United States Patent Application Publication US 2025/0325599 A1 - sequence listing, part 5

SEQ ID NO: 3 - DNA, 4204869 bp, Clostridium difficile (residues 1-2,102,435 of 4,204,869)
  source 1..4204869: mol_type = genomic DNA
atggatatagtttctttatgggacaaaaccctacaattaataaaaggtgacttaacttcagtaagttttaataccttttttaaaaacatcgtaccattaaaaatacatcttaatgatttaatcttactggctcctagtgattttaataaagatatcttagagaatagatatttacatttaattgaagatgctattagtcaactgtcattaaaaaaatataatattaaatttgtattgagcgaaaaagaggttgctgatttaaattctgatagcacagatttaaattatagagttctttaccccaatctaaatccaaaatacacatttgatacattcgttattggtaatagcaatagatttgcacatgctgcatgcgttgcagttgcagaatctccagctaaagcttataacccactttttttgtatggaggagttggattaggtaagactcacctaatgcatgctataggtcatcatattgttagtcaaaaaaaagactcaaaagtagtttacgtttcttcagaaaaatttactaatgaacttataaactctataaaagacgataaaaacgaagaatttaggaataaatatagaaacgtagatgtattactaatcgacgatattcaatttatagcaggaaaagaaagaactcaagaagagtttttccatacattcaatactcttcatgaagcaaacaaacaaataattatatctagtgatagaccgccaaaagacatacctacactagaagataggctaagatcgagatttgaaatgggacttataactgatattcaagcacctgactttgagacaagaattgctatacttagaaaaaaggctcaactagaacgtatagatgtgccaaatgaggttatgtcatatatagcaaaaaatattaagtcaaacataagggaactagaaggtgcattaactagagtggttgcttattcttctcttagcaatagggtaatatcttttgatcttgctacagaagctttaaaagatattataacaacttctaaaaatgaagaaataaatgttcttagaataaaagaaaaagtatcttctgtattcaatttaaagatggaagattttaattctaaaaaaagaacacgttcaatagcttatccaagacagatagctatgtatttaacgcgcgagcttactgatttatcccttcctaaaataggtgaagagtttgggggtagagaccatacaacagtaattcatgctcatgacaaagtatctaaggatatagaagaaagtgaagaaattaagactaaaatagacaaaattatatcagatttgaagggataatttatacacaattgtatgtttatatctcttgaataacctgttaatactttttttgaacaaaaattattaacaaattatcaagtctaaaataacaaagatattaacatcttatacacatgttaatatctttgtatttataatgttatacatacttattaacattatcaacaacacctactactattactactatgattttaacttatttttatatataaaaagccagaggaggttatccacattgaaaataatttgtaatcaaaaaatcctagcaaatagaattggaattgctcaaaaagctattaatggaaaaacaacaatagaattattaaaaggtatacttatatctacagaagaaggtcaattaaaacttactggatatgatgctgaaataggaatagaaacttatgtacaagcagaaatcatagaaaaaggtgatgttgttgtagatgcaaggctatttggagatataattagaaaattaccagattcctttgttgagatagaaactgattcagaaaataatatttacataaattgtgtaaattcaagatttaaaattaaaggttatgcagcaaaagaatttcctaaattaccagaattaaatgaagaagatttatatagcatacctcaagaaattctaaaaaatatgattaaacaaactgtatttgctatctcacaggaccaaacaaaacctgttttaatgggagaacttttagaaattgtagatagaaacttaaatttagtagcaattgatggatatagattagctgtaaaaagttgttcagttgatagtttaactgaaaatataaaagtcataattcctggaaagacacttatagatgtaaatagtttgctttctggagaggataatgttaaagttgggtttaacgaaaaaaatgctatttttataattaatgatacgaaaattattacaagattgcttgaaggagattttattgattataaaaaattattgccaagagaacataacagcagagttaaattaaacactaaggaacttttaaatagtatagagagagcgtctttattgtctcaatcagaaaaaaataatcttataaagttatctataagagataaagtaatggcaattacttctaacacagaaaaaggaaatgtgtatgaagaagttgaaatagatttagatggagattacctagatatagctttcaattctagatattttatcgaaggtttgaaaaatatagataatgaggaaatatttatagaatttactacaaatgtaaatccttgtataattaaaccaacagatgatgttaattatatttacttactgcttccagtaagaatatcatcaaatatatagcagacatgaaggagttgtcttttgtagaaaatttttctaatcttagacaactccttttataagcatatttatggtataatatacttttagtgtatcaataggaatttgtttaaaatagtgacaaggaggaactattatgactgaaataactatagaatcagaatatataaagttggatcaatttcttaaattagcagagattgcatcaacaggaggtcatgcaaaatttttaattcaagaaggtttagtgacagtaaatgatgaaatagaattaagaagaggaaaaaagataaaatcaggagatatagttaaaatagaaggaactaaaataaaagtattgtaaaaaaaggagaactttttgtgaaacttaaaagtttgcaacttgttaattttagaaattataaaaagttgcatctggaatttaatgggaaagtaaatctacttgttggtaaaaatggtcaaggaaagacaaatatagtagaatctatttatatgctttcttttggaaaatcatttaggactaacaaagataaagaaatggttagatttaatagtgaaaacttatacattggaggaagtttttcaaaatataataaatatagtctaatagagctaattattggaaaagataaaaaggggataagaataaataaagttcctttacaaaagatacaagaactacttggcaacttaaatgttgttatattttctcctgaagatttaaggttggttaaagagggtcctaaagaaagaagggcatttatagacaaagagattagtcagattatacctaaatattataaatatcttaccaattataataaaacactttctcaaaggagtagggtgcttaaaaatatacatgttgatgaagctttattagatgtatatgatgatacgttagcaaagtatggaagttatatttatattttgcgtagagactttataaaaaagatagctaatatatctgaaaatatgcatatgaatttgactaatggagttgaaagattatcaattcgatataaaaatcaaataaatataactgatgaagatactatagatacagtatataataaatttttagccaagttgtcatcgaatagacctaatgatatagaatctaagactaccagatatggtatacacaaagatgacttaaatatattcataaatgatttagatgcaagactttttggttcacaaggtcaacaaagaactgcttcaatatcattaaagttatcagagatagaattaataaaaaatgaagttgaagaatatccagtattaattttagatgatgtttttagtgagttagatgaagcaagacaaaaacttttagtaaataatttaagcaatgttcaaatgtttataacaagtgctgaagtttcacataaaaaaatatttgatgaaaaaaatgttacaatatttaatattgaaaatggcgatgttattagcatagagaatggaggaaattaaatgaaacaagaatacggtgcaagtcagatacaagtattagagggattagaagccgttagaaaaagaccaggtatgtatattggtagtacaagccctagaggtttacatcacttagtttatgaagttgtagataatagtatagatgaggctttacaaggatattgttcagacatatatgtatctattaatgaagatggcagtgttttagtaaaagataacggaagaggtatacctgttgaaatacatcctaaaactggtaaatcaactttagaaacagtattaactaatcttcatgcaggaggaaagtttggaggcggaggatataaagtatctggaggtcttcatggagttggtgtttctgtagttaatgcattgtcaaaatggatggtagcagaggtttatttaaacggaaagatatataagcagacatatgagaaaggattaccaacatctaagcttgaagtagttggagaatctcaagataaaggaacaatgattcaatttatgccagatgagacaatatttgatgaaatagagtttaaatatgaaacattggagtataggcttagagaactttctttcttgaataaaggaataaaaatagtatttgaagataaaagagaaggacaagaaaaaagaaaagaatttcactatacaggtggtttggtagaatatattaagtatttaaataaatctagaactggtatacatgatgacatagtttatatagataaaaaggttgatgattgttttgttgaactagctatgcaatatacagatggttatacagagaacatatattcttttgcaaacaatataaatacacacgaaggtggttctcatttaagtggatttaaagcagctcttactaaaactgtaaatgattatgctaagagaaataaatttttaaaggaaaatgatgttaacctacttggtgaagacataagagaaggtcttacagcagtagtatcagttaaattaccagaacctcaatttgaaggtcaaactaaaacaaagctaggtaatagctttatgagaggtatagttgatagtgtaacagttgatgaactggggtctttcctagaagaaaacccatcaacagcaagaatcatagttgataaagctttaagagcacaaagagctagagaagctgcaaaaaaagcaagagaattaacaaggagaaaaagtgtattagaaagtacatctttacctggaaaacttgcagattgtgcagaaaaagatccatctaaaagtgaaatattcttagtcgaaggggattcagcgggaggttcagctaaacaaggtagagatagaaatagtcaagctatacttccattaagagggaaaatacttaatgttgagaaatcaagactagataggatactatcttcagatgaaataaaaaatatgataacagcttatggttgtggtattggagaagattttgatatagataaggctaggtatcataaaattataattatgaccgatgctgatgtagatggagcccatataagaactttattattaacattcttctttagatatatgagacctcttatagatgaggggtatgtttatgcagcacagccacctttatataaagtgacaaagcaaaagaaggaacattatgtttactcagataaagagttaaatatcttattagatgaaattggaagaaatggtgttgaacttcaaaggtacaaaggtcttggagagatgaatgcagagcaattatgggaaacaactatgaatcctgagacaagaactttattacaagttactgtagaagatgctgcaattgcagatgaagtattttcaatgcttatgggtgataaggttgctccaagaaaagaatttatagaagaaaatgcaagatttgttagaaatttagatatatagagagaggggattagtatacatggaagaaaataacaaaatactccctattgaaatagcggaagaaatgaaaaaatcgtatattgattattcaatgagtgttatagctggacgtgctcttcctgatgttagagatggtttaaagccagttcatagaagaatattatattcaatgagtgagttaaatttaactccagataaaccatacaggaagtcagctcgtattgttggggacgttttaggtaagtaccatcctcatggagatattgctgtttattatgctatggtaagaatggcacaagatttttcaactagagcacttttagtagatggtcatggtaactttggttctgttgatggggattcaccagctgctatgcgttatacagaagctaaaatgagtaaattatcattagaactactgagagatattgaaaaggaaactgtagactttaaaccaaactttgatgagtcgttaaaagagccttcagtattgccagctagatatcctaatttattagtaaatggctcaaatggtatagctgttggtatggcaacttcaatacctccacataatttagcagaagtaattgatgcaactgtatatttgatagataatccagagtgtagtgtagatgatttaataaaatttgttcaaggaccagatttccctacagctgcaattataatgggaaaagaaagtatagcagaagcatacagaactggaagaggaaaagttaaagttaggtctagagcttttatagaagaactaccaaaaggaaaacagcaaataatagttacagaaataccttatcaagtaaataaggctaaactggttgaaagaatagcagagttagttaaagaaaagagaatagaaggtatatcagacctaagagacgaaagtaatagaaatggtatgagaattgttatagaattaaagagggatgctaatgctaatatagtattaaataatttgtataaacattctcaaatggaagatacttttagtataataatgcttgcacttgtagatggtcagccaagagttttaaatcttaaacaaatattatatcattatattaaacatcaagaagatgttgttacaagaagaactaaatttgaactaaataaagctgaagcaagagcacatattttagaaggattaaagattgctttagataatatagatgctgttataagcttgataagagcttcaaagactgggcaagaagctaagataggtttaatagaaaaattcaaattaactgaaatccaagcacaagctatattagatatgagacttcaaagacttacaggtttagaaagagataagatagaagctgaatatgaagatttaatcaagaagataaatagattaaaagaaattttagctgatgaaagattacttttaaatgtaataaagaatgaaattacaataataaaagaaaattactctgatgagagaagaacagaaataagacatgctgaaggcgaaatagatatgagagatcttataagtgatgaagaaatagcaataactcttactcactttggatatataaaaaggcttccatctgatacttataagagtcaaaaaaggggtggaagaggtatttcagcacttacaactagagaagaagattttgtaaggcacttggtaactacaactactcatagtagactattattctttacaaataaaggtagagtatttaaattaaatgcatatgaaataccagaaggtaagagacaggctaaaggtactgctatagtgaatttacttcaattgtcagcagatgagaaaattgctactctaatacctattgatggtaatgatgaaaatgaatatttattacttgcaacgaaaaaaggtattgttaaaaagactaagagagaagagttcaaaaatataaataaatctggtcttattgctataggtttaagagatgatgatgagcttattggagtagaacttacagatggaaaacaagaagtacttttagtaactaaagaaggtatgtctataagatttgatgaaaatgatataagatatatgggtagaacagcaatgggtgtaaaaggtataactttaagtaaagaagattttgttgtgtctatgaacctttgcagtaaaggtacagatgtgttagttgtaagtaagaatggttttggaaagagaacaaatatagaagagtatagaagtcaaataagagctggtaaaggaattaaaacttataatatatctgaaaaaactggtacaattgtaggtgcagatatggtcaacgaagatgatgagataatgattataaattctgatggagttcttattagaataagagtcaatgaaatatcactgtttggaagagttacaagtggtgttaaattaatgaagacgaatgatgaagtcaatgtagtttcgattgccaaaataaatattgaagaagaataggataaatatcctattctttttgtataatgtagttagataaaaatttaaaattgaaaggagtaattgttatgtgcaataaaagaagttgtaaaaaaggtggatttttattattaggagctattttagggtttatatttggtatgttttttgcacctaaaaaaggttctgaactaagaaaagaaacaaaagagaagtttaatgatgtcaaagaaaatccaaaagaagttctacatgaaacatttaatgatgttaaagagagaataataaatttagtggacgatgataataatgaagaagatataaagatttcagaagaagatatagtaataagtaaaagctttgatgatgagggagatgttaactaatgaatgcatgggggtggcaaattggagcagtgttagtaggaagctctgctcttatagtagcaatttatttagctaaaactctaaacagcataaataaggttgttgaaaaggcatataagattgtagattataatgaaagacatatacaagatattgttgaaaatgcatcatcaatatcaaagggaatagatgatatagtttatgtaattaataaaatattgagtataggaaatatatttaaaattattaaaaggaaataggaggtttttacatgtctatgaatattgattcaaatttagattcacaaaataaattttggaatgtttgtcttgatggagaacttgatgtttctacagcagataaactaaaggaacatttacatgctttaatagaaaaaaatatgttagatgtaaagattaatcttaaagatttagattatatagactcaacaggcttaggagctatgataggtgtattaaaaaaattaaaaataaatgaaaaagagatatacatagtaaatcctaagagtaacgtaaaaaagatttttactataacaggtctagataaaatatttaaagtggagggataaactttggcttgtgagactataaagatggaaattactacaaatccagattatgttagtataataagattaacagcatctggaattgccaataagatgggttttccaatagatgatatagaagatataaaggtagcagtatctgaagcatgtacaaatgcaataaaacacagtaaagatgatgtgtttaatatagtatttaatattttagataatgcaattaatatagaaattcaagataatggaaaaggatatgatgttagctcaataagtacaccagatttagagaatccaaaagagagtggtcttggattgtttataattaaaactttaatggatgatgtagatattgaatcagaacataatcaagggacaaaaataaaaatgactaaatatttaggagttgatatttaatgaaaaatgtagctaatgctacacattacctaaatatggatacaaaagagctatttaatttatataataaaaataaaaatgtagacattagaaatattcttattgaaagacatctgtatttagcaagattgttagctaagaagtatataaacaaaggtgttgattttgaagatatatatcaagttgcttcattggcattaatttatgctattgatagatatgatgttgagaaaggatttgagttctccagctttgcgacaccaactatagtaggagaaataaaaaagtattttagagataaggtatggacacttagagtcccaagaagaatacaggaattaagcaaaaagataagtgatgcgaagattaaattagaacaagaaaataagaagcatccaaaggtaaaagatatagctgattatataggcgttagtgaagaagatgttttagaggctatggaggcttcttatggatatcaaccaatgtctttggattcatcaagtaatgatgattcagaggataaagatataactcttattgataagattggaaaagaagaaggtaactttggaagtatagagtatgaagattttattaataagtttattgaaactttaaatgaattagaagttaaaatttttaaagatagatttttctttgataaaacacaatctagtatagctaaagaactagggatatcacagatgactgtttctagactagagaaaaaggtagtagagaagctgaaaaaagaatatgaaaaaaatttataaaaaaatataaaaaaagtattgacctactgttttaaagatggtatagtattacttgtccttgaaaaaaggaacaagaaataaacacgaacattgaaaattaaacagtaggttaatttatattaagaaacaaaccataaagccagatattttgataacaatagtatctgagcctgataaacttttatttgagagtttgatcctggctcaggatgaacgctggcggcgtgcctaacacatgcaagttgagcgatttacttcggtaaagagcggcggacgggtgagtaacgcgtgggtaacctaccctgtacacacggataacataccgaaaggtatgctaatacgggataatatatttgagaggcatctcttaaatatcaaaggtgagccagtacaggatggacccgcgtctgattagctagttggtaaggtaacggcttaccaaggcgacgatcagtagccgacctgagagggtgatcggccacattggaactgagacacggtccaaactcctacgggaggcagcagtggggaatattgcacaatgggcgaaagcctgatgcagcaacgccgcgtgagtgatgaaggccttcgggtcgtaaaactctgtcctcaaggaagataatgacggtacttgaggaggaagccccggctaactacgtgccagcagccgcggtaatacgtagggggctagcgttatccggatttactgggcgtaaagggtgcgtaggcggtctttcaagtcaggagtgaaaggctacggctcaaccgtagtaagctcttgaaactgggagacttgagtgcaggagaggagagtggaattcctagtgtagcggtgaaatgcgtagatattaggaggaacaccagttgcgaaggcggctctctggactgtaactgacgctgaggcacgaaagcgtggggagcaaacaggattagataccctggtagtccacgctgtaaacgatgagtactaggtgtcgggggttacccccttcggtgccgcagctaacgcattaagtactccgcctgggaagtacgctcgcaagagtgaaactcaaaggaattgacggggacccgcacaagtagcggagcatgtggtttaattcgaagcaacgcgaagaaccttacctaagcttgacatcccaatgacatctccttaatcggagagttcccttcggggacattggtgacaggtggtgcatggttgtcgtcagctcgtgtcgtgagatgttgggttaagtcccgcaacgagcgcaacccttgtctttagttgccatcattaagttgggcactctagagagactgccagggataacctggaggaaggtggggatgacgtcaaatcatcatgccccttatgcttagggctacacacgtgctacaatgggtagtacagagggttgccaagccgtaaggtggagctaatcccttaaagctactctcagttcggattgtaggctgaaactcgcctacatgaagctggagttactagtaatcgcagatcagaatgctgcggtgaatgcgttcccgggtcttgtacacaccgcccgtcacaccacgggagttggagacgcccgaagccgattatctaaccttttggaagaagtcgtcgaaggtggaatcaataactggggtgaagtcgtaacaaggtagccgtatcggaaggtgcggctggatcacctcctttctaaggagaattacctactgtttaattttgagggttcgtttttacgaatactcaaaattagcacttttagcaacagaataaactgaacgcatgtgaagtttgtttgttggcgctgtgcgttagcactttaagcaacggaatttattcgttggcgccgtgctttagcactttgaaaactgcatatatatttagtgatatgacatctaatttgtaatatataaagctgataactttttaaaattatcgaagttgatagcttctaatctatcaaacctttttaactggtcaagttattaagggtgcagggcggatgccttggcactaggagccgatgaaggacgtgataagctgcgataagcttcggggagttgcacgtaaactttgatccgaagatttccgaatgaggaaactcacttagagtaatgtctaagtatcattaagtgaatacatagcttaatgaggggaactcagggaactgaaacatctaagtacctgaaggaagagaaagaaattcgattccgtaagtagcggcgagcgaacgcggattagcccaaaccaataaagttttctttattggggttgcggacatatcataacgaagaggtatcgtaattgaagaggtttggaaagacccaccacagaaggtaatagtcctgtatgttaaacgagaagacttcagatatgatccagagtaccacgggacacgtgaaaccctgtgggaagcaggagggaccaccctccaaggctaaatactacctagtgaccgatagcgtatagtaccgtgagggaaaggtgaaaagaaccccgggaggggagtgaaatagaacctgaaaccctgcacttacaagctgtggaagcacatttcttgtgtgaccgcgtactttttgtagaacgggccaacgagttacgttaagtagcaaggttaagcacttaaggtgcggagccgtagcgaaagcgagttttaactgagcgttcagttacttgacgtagacccgaaaccgggcgacctacccatgagcaggatgaagcgaaagtaaaatttcgtggaggtccgaacccacgagcgttgaaaagctcggggatgacttgtgggtagcggtgaaattccaatcgagcccggagatagctggttctccccgaaatagctttagggctagcctcaaggtgagagatacggaggtagagcactgaatgtcctagggggtattgcacctaccgaagactatcaaactccgaatgccgtcatcttatacttgggagtcagactgtgggtgataagattcatagtcgaaagggcaacagcccagatcgtcagctaaggtccctaaatgtaagttaagtggtaaaggatgtgggattgcacagacaaccaggatgttggcttagaagcagccactcattcaaagagtgcgtaatagctcactggtcgagtgatcctgcgccgaagatttccggggctaaaacttactaccgaagctacggcatcagtaatgatgggtaggggagcttcccatacgggttgaagcatgaccgtaaggacatgtggacagtatgggagtgagaatgttggcatgagtagcgagatgtgggtgagaatcccacaggccgtaaacccaaggtttccaggggaaggttcgtccgccctgggttagtcgggacctaagctgaggccgaaaggcgtaggtgatggacaacaggttgatattcctgtactaccgataaccgtttgagagaagggatgacacagtaggataagctaagcacactgttggttatgtgtgcccaagcattgaggcagtcaaagtaggcaaatccgctttgataatgctgggatgtgatggggagcgaaatttagtagcgaagtagctgatttcacactgtcaagaaaagtctctatcgaggttaaaggtacccgtaccgcaaaccgacacaggtgggtgaggagagtatcctaaggccagcgagagaactgttgttaaggaactcggcaaaatgaccccgtaacttagggataaggggtgccaccatcaggtggccgcagagaataggcccaagcgactgtttaccaaaaacataggtttctgctaagtcgcaagacgatgtataggagctgacgcctgcccggtgctggaaggttaaggggatctgttagagcaatcgaagcagtgaacttaagccccagtaaacggcggccgtaactataacggtcctaaggtagcgaaattccttgtcgggtaagttccgacccgcacgaaaggcgtaacgatttgggcactgtctcaacaacagactcggtgaaattgtaattccggtgaagatgccggatacctgcgacaggacggaaagaccccatggagctttactgtagcttgacattgggtcttggtactacatgtacaggataggtgggaggctttgaaaccaggacgccagttttggcggagccatccttgggataccacccttgtagtactgggactctaaccataggccatgaatctggtcttgggacactgtcaggtgggcagtttgactggggcggtcgcctcccaaaaggtaacggaggcgctcaaaggttctctcagtacggtcggaaatcgtacgtagagtgtaaaggcaaaagagagcttgattgcaagacatacaggtcgagcaaggatgaaaatcggacttagtgatccggtggttctgcgtggaagggccatcgctcaacggataaaagctaccctggggataacaggcttatctcccccaagagtccacatcgacggggaggtttggcacctcgatgtcggctcatcacatcctggggctgtagtaggtcccaagggttgggctgttcgcccattaaagtggtacgcgagctgggttcagaacgtcgtgagacagttcggtccctatccgtcgcaggcgtaggaaatttgagaagacctgtccttagtacgagaggaccgggatggacgtacctctggtgtaccagttgtcctgccaagggcatggctgggtagctatgtacggaatggataagcgctgaaagcatctaagcgcgaagccaacttcaagataagatttcccaccgcaagggtaagaccccagaaagactatctggttgataggtcgaaggtgtaagtgcagcaatgtatttagcttatcgatactaataggtcgaggacttgaccaatattatttgatgtcattcattaagatatatgtgcagtttttagagtgctaaatctatatttttaaacttgtcaaaacttatggatttttaatagttttataaggcaaaaaatcgaataaaaaaagtattgacacaataagacaaagatgttattataatacttgtcttagaaaaaaagttaaatgaaaatttagacaataatctggttataatagcagagaggatacacctgttcccattccgaacacagaagttaagctctctagcgctgatggtacttggtgggaaactgcctgggagagtaggacatagccaggtgatgtgccgaagtggcggaactggcagacgcacaggacttaaaatcctgcgggacttacctctcgtaccggttcgattccggtcttcggcaccacaaattattgtgggccattagctcagttggttagagcgcccggctcataaccggtaggtctggggttcgagtccctgatggcccaccacaataatttaaagaactttgaaaattaaacagtaggttaatttataaacaagaaacaaaccataaagccagatattttgataacaatagtatctgagcctgataaacttttatttgagagtttgatcctggctcaggatgaacgctggcggcgtgcctaacacatgcaagttgagcgatttacttcggtaaagagcggcggacgggtgagtaacgcgtgggtaacctaccctgtacacacggataacataccgaaaggtatgctaatacgggataatatatttgagaggcatctcttgaatatcaaaggtgagccagtacaggatggacccgcgtctgattagctagttggtaaggtaacggcttaccaaggcgacgatcagtagccgacctgagagggtgatcggccacattggaactgagacacggtccaaactcctacgggaggcagcagtggggaatattgcacaatgggcgaaagcctgatgcagcaacgccgcgtgagtgatgaaggccttcgggtcgtaaaactctgtcctcaaggaagataatgacggtacttgaggaggaagccccggctaactacgtgccagcagccgcggtaatacgtagggggctagcgttatccggatttactgggcgtaaagggtgcgtaggcggtctttcaagtcaggagtgaaaggctacggctcaaccgtagtaagctcttgaaactgggagacttgagtgcaggagaggagagtggaattcctagtgtagcggtgaaatgcgtagatattaggaggaacaccagttgcgaaggcggctctctggactgtaactgacgctgaggcacgaaagcgtggggagcaaacaggattagataccctggtagtccacgctgtaaacgatgagtactaggtgtcgggggttacccccttcggtgccgcagctaacgcattaagtactccgcctgggaagtacgctcgcaagagtgaaactcaaaggaattgacggggacccgcacaagtagcggagcatgtggtttaattcgaagcaacgcgaagaaccttacctaagcttgacatcccaatgacatctccttaatcggagagttcccttcggggacattggtgacaggtggtgcatggttgtcgtcagctcgtgtcgtgagatgttgggttaagtcccgcaacgagcgcaacccttgtctttagttgccatcattaagttgggcactctagagagactgccagggataacctggaggaaggtggggatgacgtcaaatcatcatgccccttatgcttagggctacacacgtgctacaatgggtagtacagagggttgccaagccgtaaggtggagctaatcccttaaagctactctcagttcggattgtaggctgaaactcgcctacatgaagctggagttactagtaatcgcagatcagaatgctgcggtgaatgcgttcccgggtcttgtacacaccgcccgtcacaccacgggagttggagacgcccgaagccgattatctaaccttttggaagaagtcgtcgaaggtggaatcaataactggggtgaagtcgtaacaaggtagccgtatcggaaggtgcggctggatcacctcctttctaaggagaattgcctactgtttaattttgaaagttctttacgaactttatatatgggggtgtagctcagttgggagagcacttgccttgcaagcaaggggtcaggagttcgactctcctcatctccaccatttaagagtatattacttaaatctttgatttacttagtagcctcttacaatgcacttatagcttaaatttatacaagctttgtgcgttagcactttaagcaacgggatttattcgttggcgacgtgttttagcactttgaaaactgcatatatatttagtgatatgacatctaatttgtaatatataaagctgataactttttaaaattatcgaagttgatagcttctaatctatcaaacctttttaactggtcaagttattaagggtgcagggtggatgccttggcactaggagccgatgaaggacgtgataagctgcgataagcttcggggagttgcacgtaaactttgatccgaagatttccgaatgaggaaactcacttagagtaatgtctaagtatcattaagtgaatacatagcttaatgaggggaactcagggaactgaaacatctaagtacctgaaggaagagaaagaaattcgattccgtaagtagcggcgagcgaacgcggattagcccaaaccaataaagttttctttattggggttgcggacatatcataacgaagaggtatcgtaattgaagaggtttggaaagacccaccacagaaggtaatagtcctgtatgttaaacgagaagacttcagatatgatccagagtaccacgggacacgtgaaaccctgtgggaagcaggagggaccaccctccaaggctaaatactacctagtgaccgatagcgtatagtaccgtgagggaaaggtgaaaagaaccccgggaggggagtgaaatagaacctgaaaccctgcacttacaagctgtggaagcacatttcttgtgtgaccgcgtactttttgtagaacgggccaacgagttacgttaagtagcaaggttaagcacttaaggtgcggagccgtagcgaaagcgagttttaactgagcgttcagttacttgacgtagacccgaaaccgggcgacctacccatgagcaggatgaagcgaaagtaaaatttcgtggaggtccgaacccacgagcgttgaaaagctcggggatgacttgtgggtagcggtgaaattccaatcgagcccggagatagctggttctccccgaaatagctttagggctagcctcaaggtgagagatacggaggtagagcactgaatgtcctagggggtattgcacctaccgaagactatcaaactccgaatgccgtcatcttatacttgggagtcagactgtgggtgataagattcatagtcgaaagggcaacagcccagatcgtcagctaaggtccctaaatgtaagttaagtggtaaaggatgtgggattgcacagacaaccaggatgttggcttagaagcagccactcattcaaagagtgcgtaatagctcactggtcgagtgatcctgcgccgaagatttccggggctaaaacttactaccgaagctacggcatcagtaatgatgggtaggggagcttcccatacgggttgaagcatgaccgtaaggacatgtggacagtatgggagtgagaatgttggcatgagtagcgagatgtgggtgagaatcccacaggccgtaaacccaaggtttccaggggaaggttcgtccgccctgggttagtcgggacctaagctgaggccgaaaggcgtaggtgatggacaacaggttgatattcctgtactaccgataaccgtttgagagaagggatgacacagtaggataagctaagcacactgttggttatgtgtgcccaagcattgaggcagtcaaagtaggcaaatccgctttgataatgctgggatgtgatggggagcgaaatttagtagcgaagtagctgatttcacactgtcaagaaaagtctctatcgaggttaaaggtacccgtaccgcaaaccgacacaggtgggtgaggagagtatcctaaggccagcgagagaactgttgttaaggaactcggcaaaatgaccccgtaacttagggataaggggtgccaccatcaggtggccgcagagaataggcccaagcgactgtttaccaaaaacataggtttctgctaagtcgcaagacgatgtataggagctgacgcctgcccggtgctggaaggttaaggggatctgttagagcaatcgaagcagtgaacttaagccccagtaaacggcggccgtaactataacggtcctaaggtagcgaaattccttgtcgggtaagttccgacccgcacgaaaggcgtaacgatttgggcactgtctcaacaacagactcggtgaaattgtaattccggtgaagatgccggatacctgcgacaggacggaaagaccccatggagctttactgtagcttgacattgggtcttggtactacatgtacaggataggtgggaggctttgaaaccaggacgccagttttggcggagccatccttgggataccacccttgtagtactgggactctaaccataggccatgaatctggtcttgggacactgtcaggtgggcagtttgactggggcggtcgcctcccaaaaggtaacggaggcgctcaaaggttctctcagtacggtcggaaatcgtacgtagagtgtaaaggcaaaagagagcttgattgcaagacatacaggtcgagcaaggatgaaaatcggacttagtgatccggtggttctgcgtggaagggccatcgctcaacggataaaagctaccctggggataacaggcttatctcccccaagagtccacatcgacggggaggtttggcacctcgatgtcggctcatcacatcctggggctgtagtaggtcccaagggttgggctgttcgcccattaaagtggtacgcgagctgggttcagaacgtcgtgagacagttcggtccctatccgtcgcaggcgtaggaaatttgagaagacctgtccttagtacgagaggaccgggatggacgtacctctggtgtaccagttgttctgccaagggcatggctgggtagctatgtacggaatggataagcgctgaaagcatctaagcgcgaagccaacttcaagataagatttcccaccgcaagggtaagaccccagaaagactatctggttgataggtcgaaggtgtaagtgcagcaatgtatttagcttatcgatactaataggtcgaggacttgaccaaattatttgatgtccattcaataaaatatatatgtagtttttagagtgttaactctaaagaaactagtattactagattctaaaaacttaatagaaatattaagcataaagattatgtggttacaatagcagagaggatacacctgttcccattccgaacacagaagttaagctctctagcgctgatggtacttggtgggaaactgcctgggagagtaggacgtagccacgtaatcttttttatttgcaataaagtttaatattaaatagaatataaaatcaatattgatttataataagataaaatatagaattatatagtataggtaaagtttttgatttagaaagaaggtgtaatatgaattctgatgaaagaagaagcaaattaatagatattttaaaagaatctaagtgccctgtaaaaggtggaatgctagctgagatattaaatgtaagtaggcaagtaatagtacaagatatagcccttataagagctagaggatttgaaataatagctacacctcaaggatatataatatataatcaaccatattttacaaagcaaataaaatgtaagaatcacaggaattctaaagaaatttatgatgaattaaagattattgtagatttaggtggaattgttaaggatgtcatcgtaaatcatccaacatatggtcagataactgcagagcttaatattcactctaaaatggatatagataattttatgaagaaggttgagacaaatgaatttaaacagttatcagttctaactgaatgtagtcatattcatacaattgagacattaaaagaagagactatagaagttataacaaaagaattagaggacagaggaatattatcataaggaggagttaaatgaattttttatcattagctaaggctgcttcaacaaatagtaatataactaaaagaactttagaaaatatgcttaataactttagtgataatataccaaatattatatatgcaataatcgtatttgtaataggtatctatatatctaagatagtaagaaagatggtttcaaggtttttaatcaaatatggaatgagtaaaggtgtaaataatttcattgtatatggaatatacatatctatgttatctattatatcattgataagcttgggtgttatagggatacaaactacatcagttgtagctgtattaggagctgctggatttagtataggtttagcatttaaagaaatattatcaaatttaggttcaggtatgattattttattttttaagccatttaatataggtgattatattcaaggctcaggtgtagaaggcacagtttctgatatacaaatatttagtactgttcttaaaaccccagataataaaaccataattataccaaactttcaattgacaagtaacaatataattaattacacacatcaaaataaaagaaggatagatttttcatataatatttcatatgatagtgatattgatgtagttaagtccatattgaatgaaatttttataaatgaaaaaaggatattggatgacccaaaaccaattataggtttaaactctataggaaacaacactatgcaaatagttgctagaccatgggttaaaactgatgattactgggatgtttactttgatgtaatggaaaaagtcaaaaataaatttgacgaaaataatataaaagttccatttgttccttcctcgttattatttaataatatgagcaattcaaatacaatggataaaagatagaatttcaattaagtaaaaaagtgaatttaatataaaaaattaaagaaaattctaaaaaaatttgaataatagtattgaaagatgttaatatatataatataatgattatcaaataaaacaattagttaaaaagcggtgaaggaaaatagtaaaaaacagattgtattcagagaatgagtggatggtgagaactcattacaatggtttttgaatctactctagagcttctagttaaagctagacggtttacctacgttataggtctgagaggattatacgttttagtataatcaattagggtggcaacgcggataaaagattttcgtcccttttatagggtaaacggaggtctttttttatttttcaaatttgtttaaattaaaagtttacagctagaatacttgtaaattaattggaattataatttatattatcaaaattattaggaggaattaatatgttagatattaaaagaataagagaaaatctagatgatatcaaaaaagctatggaaagaagaggtgaaagagaatttgaccttgatgctgtagtggaactagataataaaagaagagaaatacttcaagaagttgaagttatgaaaaatgagttaaatgtaaattctaaaaaaatacctcaattaataaaagaaggaaaagatgtaacagaagaaaagacaagattgaaagagttatcagataagataaaaggtattgatgagaaagtaaaagaagtagaagcaaaaatggaatatacattaatgagaataccaaatgttcctcatccagaggtaccacaaggtgaaacagatgaagacaatgttcaaataagaacttggggagaacctactaaatttgattttgagtataaagcgcattgggatatagggacaggtctaggtattttagattttgaaagagcagggaaaataactgggtcaaggtttactttatataggggattaggagctagattagaaagatctttaatgaatttctttttaaatactcatacagctaagcatggctatacagaagtcttacctccatttatggccaatagaaatagttttatagggactggtcaacttcctaaatttgaagaagatatgtttaaaatagaaggattagagtatttcttaataccaacagctgaagttcctgttactaatatacatgctaatgaaatattagatgttgcagagcttccaattaaatactgtgcatatactccttgttttagatctgaagcaggttcagcaggaagagatacaagaggtttagttagacaacatcaatttaataaagttgaattagttaaatttgttaaaccagaagattcttataatgaattagaatcattaactcatgatgctgaaactatgttacaaatgttaggtcttccatatagagttgtaaaaatatgtacaggagatttgggatttacagctgcatttaaatatgatttagaagtttggatgccaagttacaatagatatgtagaaatatcttcttgttcaaattttgaagatttccaagcaagaagagcaggaataagatttaaaagagataaaaaatcaaaagcagaatatgttcatacattaaatggttctggattagcgataggaagatgtttggctgctatattagaaaattatcagcaggcagatggttctgtagtagttccagaagaattaagaccttatatgggtgttgatgttataaaataaatttatattaattgtatatgtagagtatgctttgatgaagagaatatattatgagtaaacaataaataaaaaaactatgaaattattataaatattaatttcatagtttttttatgttaatttacacagcagaattttcatcataaaacactaaatatttttataaaacactcttgtatgaatatctaaaaattattttagaactaattaaaaaaaatatcgctatatatagtaataattaaataaacaaaataaaattaagttgaattataaaatgaattatgataagataagtttgttataagttttgggaggaattatggaaagttcattttatatgaaagaagcattaaaagaagcatataaagcatataataaaaaagaaacaccaataggtgctattatagttaaagataatcaaataatagctagagctcataaccttacagaaacgttaaaagactctacggcacatgcagaaattttagcgataaaacaagcatcagaaaaattaggtggttggaggttgactgattgtgatttatatgttacaatggaaccttgcataatgtgtagtggcgcaatagttaattctagaataaaaaagcttataatagggacaagacatgtaaaaaattcatatatagaaaaacagcatgagtttaaattagattattttaataataataatgtaaaagtagcttttgatgttttgcaagaagaatgctcgatcatattgcaagaattttttaaggcattgagaaaaagagattaaggagagatggtcgagtggtcgaaggcgctcgcctggaaagcgagtatatgggtaaaactgtatcgtgggttcaaatcccactctctccgccagaaacaatgaaagtaattaaatatggttgtaattttgctgtactagatggggaggtagcggtgccctgtaacctgcaatccgctatagcaggattgaattccatctaaaggcttattttctgtagggccgccctaaataagtggtgttgatgcttaggtcctgcgcaatgaaagctcatgaaccccgtcagatccggaaggaagcagcggtaagtgatcacttttgtgtgccgtgggggtgcctaagttgagctaactgttttggtaacgcctatggaattaagtcgatagatggtgtacagcatttaatatataaaagactaatcccttagataatgagggatttttttattaattttgctaaagagaggtaaaaagatgcataaagcattatatagagcatatagaccacaaaaatttgaagatgttattggtcaagatcatattattaagactttaaaaaatcaaatatatagtgataatataggacatgcttatttgttttgtggaacaagaggtactggtaaaacatctactgcaaagattttttcaagagcagtaaactgtttgaataaaataaatgaagaaccgtgtaatgagtgtgagatatgtgaatctgtattaaaagataatacaatggatgttgtagaaatagatgcagcttcaaataatagtgtagatgatataagagagcttagagaaagtgtgaaatattctccagccaatgctaaatataaagtatatataatagatgaagttcatatgttgtctcaaggagcttttaatgcattattaaagaccttagaggaacctccatcatatgtaatttttatattagcaactacagagcctcacaaaatacctgcaaccattttatcaagatgccaaagatacgattttaaaagagttacagttaaagatatgacccttagaatgaaaaagatttgtgaagatgaaggaattgatatagatgataaagctcttaatttaatagctagaaattctcaaggagctcttagagatgcacttagtatattagaccaatgtatgtcttttggagaaagtaagatagattataaagatgttgttgaattaatgggaagcgtaaatatagaacaattatttgaattgtctcaatgtattgtagagcaggacactaaaaagtctcttgagatattaaatgaatttgtcttatggggcaaagatataagaaatcttataaatgacttaattgatcattttagaaatttaatggtatgtaaggtttcatcagaattggatgaaataatttcattaccagaagaaactatagaacaacttaaaattcagtctaaaaatatagatataaatgatttaataaggattttaaatatattatcaataactcaggatgatataaagtcatcttcaaatccaagggttttagtggaaataaccataatgaaaattgctcaaccaatgtttgatgaaagtaaagaagctcttataaaaagagttgagaacttagaaaaaatgattgaactggggaactttaagtctgaaaaaattgggaataataaagaaaaagagtatgaggtcgatagagaaatagatgtaaaacaagaaaatgtagtttatgaagatgtaaaaaatgaggacgttatacttatagagtcatcttggaagaatatacttaaacaaattaaaaaagataaaaaaatgccaatatacgcactcttaagtgaagtaaaaagttttaatgtatattctaatatgttgtatgttatatttgatgataaatttgattttgcaaaaactagactgagctctcaagatacaataaattatttagaaaaaacaataagagatgttttaaatagaagttttaatgtaaaaatagtactgacatcagaagttaaagatataaatcttgaagttaaagagaaaaaggacattggtgaggagatattaaagaacatagtgagtgaagagatattagaaataaaatatagtattgatgaaaatgagagtaaataataaaatactattatgatataataataaaatgaaaataagtttaggaggaatagtgtttatggctaaaaaaggttttggaggcggaatgatgcctggtggtggaaatatgaacaacttgttaaagcaggctcaaaaaatgcaagaaaatatgcaaaaagctcaacaagagttagaaagtaaagaagtagaagcttcagttggtggaggagcagttactgtaaaagttaatggtaaaaaagaagttatagatataactatcaagccagaagtagttgatccagatgatatagaaatgctacaagatttagttttaagtgcagtaaatcaagcattgagaaatattgatgatatacaagcaagtcaaatgagtaaggtaactggaggtatgaatatacctgggttattctagtaggtggtatttatgcaagtttatacaggtcccataacgagacttatagaggaattttcaaagcttcctggagtaggaagaaagactgctcaaagattggcttttcatattattaatatgaatactaatgatgtggaagctttatctaaagcgattatagatgcaaaaagagaaataagatattgctcaatttgttgtaatataacagatacagacccatgtagcatgtgttcaaataaaagtagagattcaagtgttatatgtgttgtggaagatccaagagatgtagcagctatggagagaacgagagagtttaaaggacagtatcatgtattaaatggagtaatttctccaatggatggaattggaccagatatgttaaaaataaaggaacttatccaaagacttggcaatcaggaagtcaaagaaataataatggcaacaaatcctactattgaaggtgaagcgacagccatgtatattgctaggttagtaaaaccaatgggaatcaaagtcactcggatagctcatggtcttcctgttggaggcgatttagagtatgcagatgaggtcacaatatcaaaagcactagaaggcagaagagaaatataaaaatcgaggttaatacctcgatttttgtagttttttgagttaaattcaaattaattttgatttagatttattgaataaatttcttctgtattgtataatttgttgtataaatcatttaaaaattttgataggggtgcaacatgaaaccaattatgaacttagaagaacataatgcaatgaaagaaaaaagagttaaaaaaatgaaatcaaaagataaacctaaatatgatgattttgaggatataagtttttctaataagaaaaaaactaaaaaaaatgtacgaaataaaaatgctgaatttagaaataattataaaaattatcagtatgattatgaagaagacttttatgaaccaatttaatattaaataattagaaaataaaaaatccctaatagataatatatatactatagggattttatttattttatcaaccagaaattatatttaaaattaaattagctatattttgggctgaatttgactttcttattgatttaacatttctttttagcatttctaatctgctagggtcatctattagaacttttagtaatattgacaagttatatttttttgtagttctaagtgctgcaccacaattagataagaaatcaagattctcttcttcctgacctggtatataataaggaactatcataggtacatcttttaaaagagcctcagttgtagtaagtccaccaggtttgcttactaatacatctatagaagctaaaatatcattcatcttatcagtgtatccaagaacacatacatttttatcatgataacgagacataagttttttttcgattttttcttttaggctttcattcttaccagtaattacaagtatttgaaaatctctatcagtatccagtaattcatcaagtgtctcttttatatttccagccccaaagctaccccccataagtaaaacagttaatttatcaggagataaattcaactcagaaagaacaatatctttatctctgtgagagagaaaagatttttcaacagggattccaaatgttctaattttactcggtccaactccatcaaacaccaataattcttttacatattcatgaccaacaatatagtaatcaatttcattttgtatccatgtagaatgagtagtataatcggttaatacagaaataagcggaggaacattaatggtatttgtataatgtttataaaaatgctctgtgtaagcatttgattcattattatgtaaattaaagttttttttcaatgtgcttagagcaatcattggaaaaggatgtgttcctataatcaagtctggtttttcgcttctaataagctttttaaattttttagccatgaatgttattagtagattatctttaaattcattttttgacaaaagatttgtttcagataatctatatacacttccataggctttgggagtatatatagcagatttttcgtatcctcttgaaattattttatccattgtattattaactaatttcaaactatctattatttcacattcaattggctctccatcaagtgttttggaagtaagttcttctttaatagctagagcagccctattatgcccaccaccagtggaagcagacattattaatacttttttgctcataataaaatcctcctaaaatgtagcatagtatttatattgtattatattttgatatataaaaactgtctttgtgaataaggttattgataaattatttttaatattaatctaatacaagattgcaaaaattacaagtgaaagaaatgtaaattaattttatcaaatatgttatattaaaaatattcttgtaaataaaaaatttaaatatagaataaaaaggaaaatagagcatagaatatatattagttttatgaaataaataggtttacttagcattaagttttaaaaattaaatataaagaatacatgataaataaaaaatttaaaaaaagtaaaaaattatattgactagaatagataaagatgatatagtattacttgtccttgaaaaaaggaaaaagaaataaacacgaacattgaaaattaaacagtaggttaatttatattaagaaacaaaccataaagccagatattttgataacaatagtatctgagtctgataaacttttatttgagagtttgatcctggctcaggatgaacgctggcggcgtgcctaacacatgcaagttgagcgatttacttcggtaaagagcggcggacgggtgagtaacgcgtgggtaacctaccctgtacacacggataacataccgaaaggtatgctaatacgggataatatatttgagaggcatctcttgaatatcaaaggtgagccagtacaggatggacccgcgtctgattagctagttggtaaggtaacggcttaccaaggcgacgatcagtagccgacctgagagggtgatcggccacattggaactgagacacggtccaaactcctacgggaggcagcagtggggaatattgcacaatgggcgaaagcctgatgcagcaacgccgcgtgagtgatgaaggccttcgggtcgtaaaactctgtcctcaaggaagataatgacggtacttgaggaggaagccccggctaactacgtgccagcagccgcggtaatacgtagggggctagcgttatccggatttactgggcgtaaagggtgcgtaggcggtctttcaagtcaggagtgaaaggctacggctcaaccgtagtaagctcttgaaactgggagacttgagtgcaggagaggagagtggaattcctagtgtagcggtgaaatgcgtagatattaggaggaacaccagttgcgaaggcggctctctggactgtaactgacgctgaggcacgaaagcgtggggagcaaacaggattagataccctggtagtccacgctgtaaacgatgagtactaggtgtcgggggttacccccttcggtgccgcagctaacgcattaagtactccgcctgggaagtacgctcgcaagagtgaaactcaaaggaattgacggggacccgcacaagtagcggagcatgtggtttaattcgaagcaacgcgaagaaccttacctaagcttgacatcccaatgacatctccttaatcggagagttcccttcggggacattggtgacaggtggtgcatggttgtcgtcagctcgtgtcgtgagatgttgggttaagtcccgcaacgagcgcaacccttgtctttagttgccatcattaagttgggcactctagagagactgccagggataacctggaggaaggtggggatgacgtcaaatcatcatgccccttatgcttagggctacacacgtgctacaatgggtagtacagagggttgccaagccgtaaggtggagctaatcccttaaagctactctcagttcggattgtaggctgaaactcgcctacatgaagctggagttactagtaatcgcagatcagaatgctgcggtgaatgcgttcccgggtcttgtacacaccgcccgtcacaccacgggagttggagacgcccgaagccgattatctaaccttttggaagaagtcgtcgaaggtggaatcaataactggggtgaagtcgtaacaaggtagccgtatcggaaggtgcggctggatcacctcctttctaaggagaattacctactgtttaattttgagggttcgtttttacgaatactcaaaattagcacttttagcaacagaataaactgaacgcatgtgaagtttgtttgttggcgctgtgcgttagcactttaagcaacggaatttattcgttggcgccgtgctttagcactttgaaaactgcatatatatttagtgatatgacatctaatttgtaatatataaagctgataactttttaaaattatcgaagttgatagcttctaatctatcaaacctttttaactggtcaagttattaagggtgcagggcggatgccttggcactaggagccgatgaaggacgtgataagctgcgataagcttcggggagttgcacgtaaactttgatccgaagatttccgaatgaggaaactcacttagagtaatgtctaagtatcattaagtgaatacatagcttaatgaggggaactcagggaactgaaacatctaagtacctgaaggaagagaaagaaattcgattccgtaagtagcggcgagcgaacgcggattagcccaaaccaataaagttttctttattggggttgcggacatatcataacgaagaggtatcgtaattgaagaggtttggaaagacccaccacagaaggtaatagtcctgtatgttaaacgagaagacttcagatatgatccagagtaccacgggacacgtgaaaccctgtgggaagcaggagggaccaccctccaaggctaaatactacctagtgaccgatagcgtatagtaccgtgagggaaaggtgaaaagaaccccgggaggggagtgaaatagaacctgaaaccctgcacttacaagctgtggaagcacatttcttgtgtgaccgcgtactttttgtagaacgggccaacgagttacgttaagtagcaaggttaagcacttaaggtgcggagccgtagcgaaagcgagttttaactgagcgttcagttacttgacgtagacccgaaaccgggcgacctacccatgagcaggatgaagcgaaagtaaaatttcgtggaggtccgaacccacgagcgttgaaaagctcggggatgacttgtgggtagcggtgaaattccaatcgagcccggagatagctggttctccccgaaatagctttagggctagcctcaaggtgagagatacggaggtagagcactgaatgtcctagggggtattgcacctaccgaagactatcaaactccgaatgccgtcatcttatacttgggagtcagactgtgggtgataagattcatagtcgaaagggcaacagcccagatcgtcagctaaggtccctaaatgtaagttaagtggtaaaggatgtgggattgcacagacaaccaggatgttggcttagaagcagccactcattcaaagagtgcgtaatagctcactggtcgagtgatcctgcgccgaagatttccggggctaaaacttactaccgaagctacggcatcagtaatgatgggtaggggagcttcccatacgggttgaagcatgaccgtaaggacatgtggacagtatgggagtgagaatgttggcatgagtagcgagatgtgggtgagaatcccacaggccgtaaacccaaggtttccaggggaaggttcgtccgccctgggttagtcgggacctaagctgaggccgaaaggcgtaggtgatggacaacaggttgatattcctgtactaccgataaccgtttgagagaagggatgacacagtaggataagctaagcacactgttggttatgtgtgcccaagcattgaggcagtcaaagtaggcaaatccgctttgataatgctgggatgtgatggggagcgaaatttagtagcgaagtagctgatttcacactgtcaagaaaagtctctatcgaggttaaaggtacccgtaccgcaaaccgacacaggtgggtgaggagagtatcctaaggccagcgagagaactgttgttaaggaactcggcaaaatgaccccgtaacttagggataaggggtgccaccatcaggtggccgcagagaataggcccaagcgactgtttaccaaaaacataggtttctgctaagtcgcaagacgatgtataggagctgacgcctgcccggtgctggaaggttaaggggatctgttagagcaatcgaagcagtgaacttaagccccagtaaacggcggccgtaactataacggtcctaaggtagcgaaattccttgtcgggtaagttccgacccgcacgaaaggcgtaacgatttgggcactgtctcaacaacagactcggtgaaattgtaattccggtgaagatgccggatacctgcgacaggacggaaagaccccatggagctttactgtagcttgacattgggtcttggtactacatgtacaggataggtgggaggctttgaaaccaggacgccagttttggcggagccatccttgggataccacccttgtagtactgggactctaaccataggccatgaatctggtcttgggacactgtcaggtgggcagtttgactggggcggtcgcctcccaaaaggtaacggaggcgctcaaaggttctctcagtacggtcggaaatcgtacgtagagtgtaaaggcaaaagagagcttgattgcaagacatacaggtcgagcaaggatgaaaatcggacttagtgatccggtggttctgcgtggaagggccatcgctcaacggataaaagctaccctggggataacaggcttatctcccccaagagtccacatcgacggggaggtttggcacctcgatgtcggctcatcacatcctggggctgtagtaggtcccaagggttgggctgttcgcccattaaagtggtacgcgagctgggttcagaacgtcgtgagacagttcggtccctatccgtcgcaggcgtaggaaatttgagaagacctgtccttagtacgagaggaccgggatggacgtacctctggtgtaccagttgttctgccaagggcatggctgggtagctatgtacggaatggataagcgctgaaagcatctaagcgcgaagccaacttcaagataagatttcccaccgcaagggtaagaccccagaaagactatctggttgataggtcgaaggtgtaagtgcagcaatgtatttagcttatcgatactaataggtcgaggacttgaccaatattatttgatgttattcattaagatatatgtgcagtttttagagtgttaactctatgtaaagtactaacttcaattgatgaagtatatatcgtaaaaacaattactatttagtacttcaaaactattgacatttaaaaataaagatgttaatataatacttgtcttataaataggcaatatgtggttataatagcaaagaggatacacctgttcccattccgaacacagaagttaagctctttagcgctgatggtacttggtgggaaactgcctgggagagtaggacgtagccacgtgaatattccaaggtagctcaatggtggagcaaccggctgttaaccggtaggctgtgggttcgagccccacccttggagccaaaaaaagccgaagtggcggaactggcagacgcacaggacttaaaatcctgcgggacttacctctcgtaccggttcgattccggtcttcggcacttataaaacaatatcgcggagtggagcagttggcagctcgtcgggctcataacccgaaggtcgtaggttcaagtcctgcctccgcaaccattaaaatggctcgttggtcaagaggttaagacaccgccctttcacggcggtaacaggggttcaattcccctacgagtcaccaattaaatatgcgggtgtagctcaatggtagagttctggccttccaagccagctgtgagggttcgatccccttcacccgctccaaaaatgggaccatagctcagctgggagagcacctgccttacaagcagggggtcacaggttcgagccctgttggtcccaccatttgcggcctggtagttcagttggttagaatgccagcctgtcacgctggaggtcgagggttcgaacaccttccaggtcgccaaaataaaatgctggtgtggctcaacggtagagcagctgacttgtaatcagcaggttgtaggttcgattcctatcaccagctccatgtaaaattaatacggaggatttcccgagcggccaaagggggcagactgtaaatctgttgtcatcgacttcggtggttcgaatccaccatcctccaccaaaaaatgcgcggatgtggcggaattggcagacgcactagacttaggatctagcgccattggcgtgggggttcgactcccttcatccgcaccatttttgtttgatatacatatataaattgtgggtgcatagctcagctggatagagcaacgcccttctaaggcgtgtgtccggggttcgaatccctgtgcgctcaccacatatattggggattagccaagtcggtaaggcacatgactttgactcatgtatgcgtaggttcgagtcctgcatccccagccaaatgatgtattactaagctatatttgaactatttttattttaaatatagttaggttcaattttagaataagtttaagtatccgaatgtggagaggtgtccgagtggtttaaggagctggtcttgaaaaccagtgacttcgaaaggggccgtgggttcgaatcccaccctctccgccaaatgcccagatagctcagtcggtagagcaggggactgaaaatccccgtgtcggtggttcgattccgcctctgggcaccaaaatatggcggtatagcttagttggctagagcgttcggttcatacccgaaaggtcataggttcgactcctattaccgctactaaaatttaatgtgggccattagctcagttggttagagcgcccggctcataaccggtaggtctggggttcgagtccctgatggcccaccacattaaattaattaatataaattcgaggtgtagcgcagtttggtagcgcacatggtttgggaccatggggccgggggttcgagtcccttcacctcgaccaatataaggtgggtatagctcagttggttagagcgccagattgtggctctggaggtcgtgagttcgactctcattatccaccccaattcatatggtctattagctcagtcggtagagcacctgacttttaatcagggtgtcccgcgttcgagtcgcggatagatcaccaaaaaggtggcgacatagccaagtggtaaggcagtggactgcaactccttgatccccagttcgaatctgggtgtcgcctccaaaatattccaaggtagctcaacggtggagcaaccggctgttaaccggtaggctgtgggttcgagccccacccttggagccaaaaaagccgaagtggcggaactggcagacgcacaggacttaaaatcctgcgggacttacctctcgtaccggttcgattccggtcttcggcacttataaaacaatatcgcggagtggagcagttggcagctcgtcgggctcataacccgaaggtcgtaggttcaagtcctgcctccgcaaccattaaaatggctcgttggtcaagaggttaagacaccgccctttcacggcggtaacaggggttcaattcccctacgagtcaccaattaaatatgcgggtgtagctcaatggtagagttctggccttccaagccagctgtgagggttcgatccccttcacccgctccaaaaatgggaccatagctcagctgggagagcacctgccttacaagcagggggtcacaggttcgagccctgttggtcccaccatttgcggcctggtagttcagttggttagaatgccagcctgtcacgctggaggtcgagggttcgagccccttccaggtcgccaaaataaaatgctggtgtggctcaacggtagagcagctgacttgtaatcagcaggttgtaggttcgattcctatcaccagctccatgtaaaattaatacggaggatttcccgagcggccaaagggggcagactgtaaatctgttgtcatcgacttcggtggttcgaatccaccatcctccaccaaaaaaatgcgcggatgtggcggaattggcagacgcactagacttaggatctagcgccattggcgtgggggttcgactcccttcatccgcaccatttttatttaatttaataaacgagcgggaatagttcagtggtagagcgcaaccttgccaaggttgaagtcgcgagttcgaatctcgtttcccgctccaaattttatgtttatgttgtaatgtgggtgcatagctcagctggatagagcaacgcccttctaaggcgtgtgtccggggttcgaatccctgtgcgctcaccacatatatattggggattagccaagtcggtaaggcacatgactttgactcatgtatgcgtaggttcgagtcctgcatccccagccaaacagtatggtctattagctcagtcggtagagcacctgacttttaatcagggtgtcccgcgttcgagtcgcggatagatcaccaatggagaggtgtccgagtggtttaaggagctggtcttgaaaaccagtgacttcgaaaggggccgtgggttcgaatcccaccctctccgccaaatgcccagatagctcagtcggtagagcaggggactgaaaatccccgtgtcggtggttcgattccgcctctgggcaccaaaatgtggcggtatagcttagttggctagagcgttcggttcatacccgaaaggtcataggttcgactcctattaccgctactaaaatttaatgtgggccattagctcagttggttagagcgcccggctcataaccggtaggtctggggttcgagtccctgatggcccaccacattaaattaacttatggtgggtatagctcagttggttagagcgccagattgtggctctggaggtcgtgagttcgactctcattatccaccccaacttatatggtctattagctcagtcggtagagcacctgacttttaatcagggtgtcccgcgttcgagtcgcggatagatcaccaaaaaggcggcgacatagccaagtggtaaggcagtggactgcaactccttgatccccagttcgaatctgggtgtcgcctccaataaaatgcgctcatagctcaactggatagagtgtctgactacgaatcagaaggttaggggttcgagtccctttgggcgcaccatatgaatagcgagggattatagctcagctgggagagcacctgccttacaagcagggggtcacaggttcgagccctgttaatcccaccagtgcaaacctctagtaaaactactagaggttttatttttgattgaaaaagtttttatatttaggaggtaagaaatttgtatatagtaataggaaatgaaatagttgatagtgaagaacttaaaataattatagatgaaaatagtaaatttaaagttgaaaaagatttaagtaaaagcacaaaaagagaagatgtaatagcatatcagttaagtatagatttaaattacctagattctcttataaatgagcaatgtaatttgtccagtttatctgatgaagagaaatttgatgaatatatgactttgtctgatgaacttgcactggatttagaagagttaatgccaaaatatacaataataaatgctagagcatataaattagacgaggtagatggaattgtaaaaataatactagctgtagcgtatgcagatttagggcacttaaaactttctgatgtagtaaagaggctatctagacaagtagattaggatatgaatatgaactatattaaaaaaatgtataaaatcttacgtaaagatgaaaataattatgtaaacatagaaaaaaacagtataaaatcaagtcaattgtagaaattttcacataaattcatctgaaattctataaaaaatgccttaattttaatgaggtaaatcgagtttacacagtctaaaaattacttatatttataaatttatcttattaattaaggaactttcttaaacatcttcaaaaataaagtattttagtctataatctttaatattacacaaacaataaaggagaagaatagagtatgcttaaaaagtttaataaaatactagtggctaatagaggcgaaatagctataagaatatttagagcctgttcagaattggggataaaaagtgttggtatatacagtaaggaagataagtatggattgtttagaacaaaagcagatgaatcatatttgataggagaaggtaaagggccaatagatgcatatttagatatggatggaataatagacctagcaaagagaaaaaaagttgatgctatacatccaggatatggttttctagcggagaatgcagaatttgctcgtaaatgtgaagagaatggaattacttttataggaccatcatctaaggtaatgaatatgatgggggataagattaactctaaaaaaatcgcaaaagaagttaatgttcaaactataccaggagtagaaaaagcaataagaagtactgaagaagcaaaggaagttgcaaacaaaataggatatcctgttatgataaaagcatctaatggcggtggcggtagaggtatgagaattgtacatcgcgaagaagacttagaacttgaatatgaaactgcttgtagtgaatcaagaaaagcttttggagaagatattatatttatagaaaaatatatagctgatccaaaacatatagaagttcaaatattaggtgataattatggaaatatagttcacttatatgaaagagattgttcagttcaaagaagacatcaaaaaataatagaatatgcaccagctttttcgttagatgataaagtaagaaaagagatatgtgaagatgcagttaagttatcaaaacatgtgggttattctaatgcgggaacattagaatttttagtagatgcaaatggtgggcattattttatagagatgaacacaagagtacaggttgaacatactgtaacagagatggttacaggaatagatatagttcaaagtcaaatactaatagcccaaggttacagcttagatagtgaagaaattaatataaaatcacaagatgatgtggaaataagaggttactctatccaatgtagaataactacagaagaccctaagaataaattcatgcctgatacaggtaaaattcaagtttatagaactggttcaggatttggtataagactagatggaggaaatggatttacaggggcaaacataagtcctcattatgatagtttattggttaagacaatatcttgggatagaacattccaaggagcaataaataaaactataagatctataaaagaacttagagttagaggtgttaaaactaatgtaggattcctagttaatgttttaaataatcctatattctcaaatggtaaatgtagtactaagtttatagatgaaaatccagatttatttgaaataacagaaagtaaagacagaggaacaaaattacttcaatttataggagatgtaattgtaaatgataatgcttgtaaagaaaaaccactatttgatgcattacatgacccaagaatggataaggatggttcaaaatcagaaggaagtaaaatacttttcgataagttaggtaaatctgcatatatagaaaagataaaaaatgataagaaattactattaacagatacaacaatgagagatgcacatcaatcattattagcaacaagaataagaacatatgacttattaaaagctgctaagccaacagaaaaatatcaaaaggatttattctcacttgaaatgtggggaggagctacttatgatgttgcatatagatttttaaaagaatctccttggcgtagattacaaaagctaagagaagaaataccaagcataatgttccaaatgttgcttagagcatcaaatggagttggatataaaaactatccagataatgtaatagaagaatttacaaaagaatctgctagacaaggtatagatgtatttagaatatttgattcattaaactgggttgaaaatatgaaaccatctattaatacagctttagaaactggaaaaattgttgaagcaactatgtgttatacaggtgatatactagataagactaaaactaaatacaatctagaatattatattaaaatggcacaagaattagaaagcttgggagcagatataatagcaataaaagatatgtcaggtcttcttaaaccatattcagcttacacactagttaaagagttaaagaaaaatgtaaaagcaccaatacatttacacactcatgatacaagtggaaatggtgtagcaacttgtttaatggcgtcagaagctggagtagacataattgatgctgcattagaatctatggcaggacttacaagtcagccatcgcttaatgctatagtagaggcacttaagaatacagagagagatacaggaatagatttatttggatatgatgagttaggaaaatattataaggatttaagaaaagtttataataaatttgaaagtgatttaactaattcttgtgcagaaatatataattttgaaataccaggaggccaatatacaaacttaaaacctcaagctgatagtttaggattagttaatagatttgatgaagttaaagaaaaatataaagaagctaatgaagttgtaggagatataataaaagtaactccatcttcaaaagttgtaggagacttagctatctttatgactaaaaataaattagataaagacaatataatagaagaaggtaaaaatttatcattcccagattctgttgtggattactgtaaaggtatgattggtcaaccagaaggtggaataccaaaagatttacaagaggtagttctaaaaggtgaagaagctataacagtaagaccaggttcattattaccagcagaagattttgatgaaatagctaaatatctaaatgaaaagtatgatataaatgctaatataagaaatgttataagttatgctttatatccaaaagtatatgaagattatatcaaacatctacaacattataatgatatatctaaacttgaaagtgatgtattcttctatggattaaataaaaatgaagaatgtgaagtagaaatagaagaaggtaaggtattaacaataagattagttgaaattggtgaagttaaggaaaatggatttagaactataggatttgagttaaatggaatggttagagaagtagaaataaaagataagaatttctctggaaaaattaataatgttgaaaaagctgatatgaatgaccctcttcaaattggagcaagcataccaggaaaagttataaaaataatggttaaagaagaagatgaagtaaaagcaaatcaaccattaatcgttatagaggctatgaagatggaaactataatagttgctaagactgatggagtaattaagtcaatcaaagtaaaagaagatgatatggttgaagataaacaattattaatgataatgaagtaatttaattaaaataaattaaaaagcactctgaaatgtttaataaaaaatgttttagagtgtttttatttattttaattaaatatttgttaaaaaaaagaggacaattacctccagatgtagaaataaagctagtaaggaaaatgttatctaaaaattctaaatatagtaaatattttccataatatttcttaggaaataacagcaaagataaaatacataaatttaaaaggtgggtgcttatatgaaggtttatgatagtaaaatgttgagaaatgtagcagtattaggacatagcggatgtggaaaaacaaatctaatcgaaactatagcttacacagcaaacactaataagatacctaaattaacagacaaggtaaatatgacttatagcatgggattaatacctatagagtataatgattataagtttaacttattggataccccaggatattttgactttagcggagacgttgtgtcatctcttagagcaagtgatgcagcaataatagtaatagatgcaacagcgcctattcaagttggtacagagaaatcattagaactaactgagagtattcctaagataatgtttataaataaaatagataatgaaaaggcaagatacaaagatgcaatagcaatgttaagagaaaaatacaataataagatagttcctatgataagtcctatatacaaagataaaaactttgtaaagttacataatgtttttgaaaacatagatgatttagaaggtgaatttaaggaacaagctatgagtgttaaagaagcattaatggaacttatagcagaaactgatgaccaaatattagataaatattttaatggagaagaactaactacggaagagatacaaaaaggtattattataggtatacaaagaggtgatattatacctgtaatatgtggttcaactataaataatataggcacaaaggaaatattagatacaatatcaagttatttagaacctatctttacagaggaaagcaaaccatttaggggattagtatttaaaactatggttgacccatttgttggaaagatgtcatatataaagattactgagggtgtactttctaaggataaagatgtttttaatataaataaaaatgtaaaagaaaaaatagctaatatatatacattgagaaatagtgaattagtagaaatagaaaaagctaaagctggtgatatagtagttataactaaagttaattctctaaaaacaggagacactatatctgcagataaagatgcagaagctttagaaaagatagattttcctaaaccacaaatatattatgcagtaactcctaagaataaaggtgatgaagaaaaagtagcatctgtattaaataaactagtagaagaggaccctacattacattggtatagaaatacagagacaaaacaagcacttttaggaggtcaaggagaacttcatataaaaacaattaaaaataaaatgaaagataagtttggtgttgatgttgaattgaatgaccttaaagttccttatagagaaactataaaaggaacagccgatgtacaaggaaaacataaaaagcaatcaggtggtcatggtcaatatggagacgtaaaaataagatttgaaagatgtgaatctgattttgaatttacagaagaaatatttggtggttctgtaccaaaacaatatataccagcagttgaaaaaggtctaaaagactctatgcaaaaaggtatattagcaggttatcctgttacaaacataaaagctacgctttatgatggttcataccatgatgtagactcttctgaaatggcctttaagatggcagcaagtgcagcctttaaaaaaggtatggaagaagcgcacccaatactactagaacctataatgaaacttaagataactgttccagaagaatatatgggagatgtcatgggtgatataaataagagaagaggaaaaatatttggaatggaaccagatgacaaagggaaacaaataatatttgcagaagctccacaagcagagacatttaaatatgcaatagatttaagagcaatgacacaaggtagaggatactttgaaatggaattagagagatatggagaggttccatcacagtttgcagaaaaaataattgggttagctactgcaaagtaatgaacaaaataaatagaaaaataattaatatatattattaaaaatatttttagggttttaactaggtataggtttatgttaggtaaacttatacctagtttttatacatttttgatgaataaaaaaatatataatactttcttaaatgttttaataaaaagaaagtatttttttattattatttttacaaatgtttagtaataaagatgagaaggtatatttaaaatataaagtatttaaagttctgaaatctaatcatgaagcaaaaaattagcatttggttatcaataaatataataaataaaaactcataattaatgaaagaataaattcatatctaaatttctataaaaaatttaaatttatacaatttagggctttaaaaatttaaataataggtgtaaaataatagtcaaagaaagtcaaaaataaaaaggtgtgtggtgatattaatggcaactatgacagatataattgaaaaatttattaaagatttgatggaagaagataatagcatacaaattcaaagaaatgaactagcaaacttgtttagttgtgcaccatcacaaataaattatgtcttaacaacaagatttacaatagatagaggatattacattgaaagtaaaaaaggtggcggaggatatgttcaaatagaaaaaatacgaaaaagtaaagatggacatattagagaactactaaatgaaaaaataggaagtcagatatcctataaaaaagcaaaggaattattagaaggtttaaaagagtcggatttgattaacgaaagagaattaaaattaatattatatgcaatagatgataaatcattgtgtatgccaatatatgaattaaaagagaaggtaaggtctaatattttaaagaatataataataggattatttagtatagaggagtgataatttatgctatgtcaaaaatgcaataagaataaagcatctgtatattataataagatagtcaatggagaaaaaacagagatgtatttatgtagtgagtgtgcaaaagagaatacagaaatgaattttaacttagatatgcctttttcaatgatggatatattttctaatttaggttttcaacctaaaaaagaacttgaggaaaagctagtttgtcctaaatgcaatacaacatatagtgagtttaagaataatgggagatttggatgtagtgaatgttataatgcatttagtagtcaagtaaatccaatgcttcaaaatatacatgggcatatagaacatacaggaaaagcacctaaaaaatctttttataagataagtgtagaaaatgagattaaagaactaaaagaagatttagatagagctataaaaaatgaagagtatgaattagcagctcaatttagagataaaattaaatatttaaaaggttctattgactaagattggagtgatattatgaaagagaacatagtcatgaaatcaagagttaggctagctagaaatttaaataactatccatttccaaataaattagataaagaatgtgccatggaaataatagaaaaagtaaaaaatgcgtttattaattctaacttagaacaaaaagaagaatttgatttctataaaattgaagatttagaccaatctaaaaaaatgcttatggttgaagaacatataataagcccagatttagcagaaaatgataaaagtgcagttatagtaaaaaaagataaaactataagcataatgataaatgaagaagaccatataaggatacaaactatatgtgatgatttaaacttagaatatgcatatagtgtagcaaatgaaatagatgatttgttagaatcaagtttagaatatgcctttaacacaaagctaggttatctaacatcttgtccaactaatacaggaacaggaatgagagcttctgtaatgatgcatttaccagcattaagtcaactaggctatatggatgaactttataaaatttcatcacaaataggtatagcaattagagggatatatggagaacgaacagaagcattgggaaatatatatcaaatatctaatcaacttacacttggaagaacagagtctaatattatagaaaatgtaagtggacttacaaaagatgcaatttcaaaagaaataaaagctagagaaatattgcaaaaaaaattaggtataaaactagaagataaaatatttagatcgatagggacacttgaaaattcaagagtaatgagtagcgcagaggcaatgagccatctatcaaatataaaaatgggaatagaaatgaactatatagataaactagatttaagggctatagaacaacttatgataggtatacaaccagcgcatcagtcaataatgtataagagtgatgatgttgagaatagagatataaatagagcaacatatattagagaaactttggaaaaattaagaggagggatgaattgtgaacttcaatagatttacacaaagagctaaaaaggcaattgatttagcgtttgaatctgctaaaagtctaggacacaatattgttggaagtgaacatatacttttaggtcttttaagagaagaagaaggtatagctgctaaagttctaagtaaagttggatttacagaagcttatttagaaggcaaaatagttgatatggaaggtaagggagaagaaatctcagaagatatagtattaagtccaaggagtaaacaaatacttgaattatcaggaatgtttgcaaataaattaaaaacaaattatattgggactgagcatatattattagcaattattcaagaaggtgaaggaatagctaataagattttaaattatgctggagtaaatgataggactttagcccaattaacaattgatatgatgggtattagtgataaaaatcaatacaaagcagagaatagttacacgggcaaccagaatcaagcagaatctaaagtacttgataagtatggaagaaatcttacactatatgcaaaacagaataaaatagaccctgtaataggtagagaaaaagaaatacaaagagtaatacaaatattaagtagaagaactaaaaacaatccagtgttgataggagacccaggtgtagggaaaacagccatagctgaaggtctggctacaaatatagccttaggaaatgttccagaaacactaaaaaacaaaactttatactctttagagatgggttcattattggctggggctaagtatagaggagaatttgaagaaagaattaaagaagttgtagatgaagttgttaaaaatggaaacataatcttatttatagatgagatgcacacaataataggggctgggtctactggagaaggctctatagatgcttcaaatatattaaagccagccttggcaagaggagaaatacaagttataggtgcaactacaattgatgaatatagaaagcatgttgaaaaagattctgctctagaaagaagattccaaccagttatggtagatgaaccaactaaagaggactcaataaaaatattagaaggattaagagataaatatgaagctcatcataaagttaaaataactgatgatgctataaaggcagctgtagaattatcaactagatatatatcagacagatatctgccagataaagctatagacttgattgatgaagctgcatcaaaagtaagattaaaagaaaatacacctccttcagaaataaaaaaattagaactagaaatagaaaatatagataaagaaaaagaagaagcagtaagatgtcaagactttgagaaagcagccaaaataagagatgaacaaggtctacttaaaaaacaattagaagatgttagagaaagatggaacaagtcatctaaacattcagatttagttgatggagaagttattgctgaagtagtgggcttatggacaggaataccagttaataaaattcttgaagaagaggctgatagacttttgagacttgaggaaatactgcacaatagagttataggtcaagaacaagcagtaaaatctatttcaaaggcaatcagaaggtcaagagcaggtcttaaagaccctaatagaccaattggttcatttttatttttaggtccaacaggagtaggtaaaacagaattatctaaggcattagcagaagtgcaatttggagatgaaaatcaaataattagaatagatatgtctgaatatatggaaaaacatgctgtgtcaagaatgataggttcacctccaggttatgtaggtcatgatgaaggtggtcaattaactgaaaaagtaagaagaaatccatattcagttatcttatttgatgagatagaaaaagctcatccagatgtatttaatattctgttacaaattctagatgatggtagactaactgattcaaaaggaagaactgtagattttaagaatactattgtaataatgacatcaaatgttggagcatctacaattggtagacaaaaaactttaggatttagtatagctaaaggagacgaagaagaaaaatctcaatatgaaaaaatgaaagaaaatataatgggtgaattaaaacaaagattcagaccagagtttttaaacagaatagatgatataattgttttccactcactaaatgaaaatcatatatcaaaaatagtacttttaatggcagcgaaactacaagagagattaaaagaaatggatataaaattagaaatgagtgatgaggctgttaaattaatttctaaatctggatttgacttagaatatggagcaagacctcttaaaagagctttacaaaaagagttggaagatgagctatctgaagcaatcttaaaaggtaatgtgaaaaagggaagtaatgtagtagcaaaagtcaaagatgaaaaaatagtttttgaaactaaataatttaatagagttgcattttaaaatattgcaaatataagttttataatctaaacaaaattttaagggcaatgaatctataataattcattgtccttaattattttatttaatctttacatattgtctttcagatatgctaaaattatagtatagaataaaaaattaaggatgataaaagtatggcaaaaataaaaacaaaatatgtatgtcaatcttgtggatatgaaacagctaaatggcttggtaaatgtccagaatgtacaaaatggaatacatttgtagaagaaatagaccaaaaaagcaccaaaaaagaggtctttataatagataaatcttcatctaaaccagtcagtataaactcaatagaaagtaaagaagaagagaggtttacaacagatataaatgaattagatagagtgcttggaggaggtatagttaaaggctctttagtgcttgttggtggtgaccctggtataggtaaatcaacacttttaatccaagtatctagtaatgttgccaatttaggaaaaactgttttatatataactggagaagaatcagaatctcaaataaaaatgagagctaaaagattaggtattaactcagaaaatttatatatatttgctgaaaataatttaagtataattgaatcttatttagaaagtgtaaatccagaattaataattctagactcaattcaaactgtcttcagtccagaaatatcctcggcaccaggaactgtcagccaaattaaagaaggtacttcaaaattcatgaaaatttctaaaaaaatgggaatttcaacgttcatagttgggcatgttacaaaagaaggttcactagcaggaccaaaattattagagcatatggttgatactgttctatattttgaaggagaaagatataatacttatagattagtaagagctgttaaaaatcgatttggttcaactaatgaacttggagtatttgaaatgagggatttaggattagtagaacttgataatccatctaaaattttaatctctgaaaaaccaaaagatgtagcaggttcagtaataatatctactgtagaaggtacgagaccaatgttacttgaattgcaagcattagtttctcctacaagttttggtataccaaaaagaacatctacaggagtcgattacaatagagtaggtatgttattagcagtattagaaaaacgtgttggtttgcaaatacaaaatcaagatgtctatataaacatagttggaggaataaagataaatgaaccctcaattgatttagggatagccatttctgtagcatctagttttagaaatataccgatagatgaaaatatagctgttacaggagaagtgggacttacaggagaagttagagcagtaagctttatagaaaagagaatagctgagtgtaaaaaacttggatttaaaaagatagtagttcctagaagtaattatgatgttgtaaaagagaccaaaggcatagaaatatggccagtagataacttaagacaagctataaatatagtacttgggaggaatcaataaatatggagaattttctagataataaaaatatgctatatgcattaaaaatgatatctcctggaactccacttagattaggtctaaacaatgtactaagagctaagactggtggattaattgtaattgcaacaaacgaagatgtaatgaaaatagtagatggaggatttgctataaatgcagaatattcaccatcatatctatatgaattagctaaaatggatggagctatagttttaagtggtgatgtaaagaaaatattatttgctaatgcacaacttatacctgactattttatagaaacatcagagacaggaacaagacatagaacagcagaaagagtagcaaaacaaactggtgctatagtcataggaatttcacaaagaagaaatgttataacagtttatagaggaaatgagaagtatgtagtcgaagatatatctaagatatttactaaggcaaatcaggctatacaaactctggaaaaatataagacagtattggaccaagctgtaacaaatttaaatgccttagagtttaatgatttggtaactatttatgatgttgcattagtcatgcaaaagatggaaatggtaatgagagttacaagtataattgaaaaatatgtgatagaattgggtgatgaaggaactttagtaagtatgcaattagaagaattaatgggtacaaccagaatagaccagaaattaatattcaaagattataataaagaaaacacagaaataaaagaacttatgaaaaaggtcaaaaatttaaattcagaagaactaatagaattggtcaatatggcaaaactattagggtatagtggtttttcagaaagtatggatatgcctataaaaacaagaggttataggattcttagcaaaatacatagactaccaacagcaataatagaaaacttagtaaattattttgaaaactttcaacaaattttagatgcatctattgaagaattagatgaggttgaaggaataggtgaaataagagcaacatatataaaaaatggactcataaaaatgaaacaattagtcttattagatagacacatatgatgaattttaaatgaattttactacttttttcttgaatataatatacactttggtctataatagataagtataactagggggtgaagcattgataaggaaagtaacaagaatattgtttattttacttggatttacaataggtataacaacctatttaacattaatgaaagattttgaaatattaacatttggaaaagaaacatatggttatatcgcagctgtagtagcaggtataataatagccattttaggatatcttatagaaccatgggttgtaaataaagtaaaagaaattgctaaaatagtggataaagaattgtcaaaatatcctcagactgatatattgttagggtctatgggtcttatagtaggatttgttattgcgtatttattaagtggattagtaaatagaataccaatagtaggtggaatactatccttactattatatttattcctaggatatcttggaatgaaagttgcgcttaaaagtaaaaatgatttatttaatattggaaaactaggaagattagcaaatcctattaaggataaagataaggataaagaaaataaaaaagaagtaaaagccattcctccaaaagtattagatacaagtgtaataattgatggaagaatagctgatatttgtaagactgggtttatagaaggaaaacttattattcctgcttttgttttggaggaactaagacatattgcagattcttcagatgatttaaaaagagtaagaggtagaagaggtctggatatattaaatataattcagaaagaattaaatatagaagttgaaataagtgagagagactttgatgatatagcagaagttgatagtaaattattaaagcttgctcaggttttaaatggaaaagttgttacaaatgattataacttaaataaagttgctcaattccaaggtgttgaagtattaaatataaatgagttagctaatgctataaaaccagttgctataccaggtgaagatatggttgttcaagtggttaaagaaggaaaagaggctcaacaaggtgttgcatatctagatgatggaactatgatagttgttgatggaggaagaaaatatatgaatgagactataaaagtactcgttacttctgttcttcaaactcctgcaggtagaatgatatttgcaaaacctaaaaattaatatgttcaaagaaacctataatttgggctgtttattttaaatagatggtccaaatttatttatttataacgataatgtttaatgtattcttaaagatggggatttaaatcagaaagcagggagaatttatgagaaaaaagattatatctttcttagcaacatttatcataatattaacatcagcaagtcagtatagttttgcagatgatatgtcaacacgtggaaaagtaatatttatagatatgaatagaactagtatgagtaatatgttaagaataaaatcattaagagaagaactagacaatagagggtatattggcttgatgaatataagaggcgataaaggaagtgatgatagaaggtcatatgctagtatgggtgctggtggtagagctaatgtggctaatgaagaagatattaattttgaaagctcgagtaaggatagaaatatagtttttgaatcagctacaggaaaaagtgcaaaaggtataaataatttaactataaataagtctataaatgaaaatttaaactttggagagtatggttctgtattagggtcattaggacaaagtttatctgagaatggattaaaagcatctgtattgggtaattcagatataattgaaaatggtcaacttataaaaaatagaaacttatgtctaactgcaatggatgaatatggaagaatacctaatggaaatgtagatactataaataaaaaagacttatctatgccttatggaatatcaactgattatgataaattgattgtagagaccaaagaagcttacaaaaataatgatgtggtttttgtggagcttggagacacatatagattagatttatataaaccaaatttaaatgaaaaaacatatgagagtgtgaaagataacatagaaaaaaatatagatgtatatttaaaaaatatattttctatggttgaagaaaatgacactgtctacatagcaagtgcatttccaagtgatttagattataaaaataaaagaagactttctccaataataaaattaaatggagaagggaaaggtatattatcatcttcaactactagaagagaaggtattgtaacaaatttagatgttggggttgaaatattagacaactttaatataaaaaatcaaaatatggttggaagaaaatatgaacttattaacagagatgataataaagaatttttgatggatgaatatcaaaagatagtatctatttcaagcataaggtctacaatactgaatggttttgtaagtatagttttcttgtcatggatagttgctatgattgcaattttatttagaaagcatatatcaaaaaattataaagaaacaacattttttatattaaaggaacttttaaaaataggaatagtaatgccactgtcatttatgataacaccaataatgaatttcaaaacaccattagcaatatctttaggaataattataataacacttactatatatcttataagtaaagttttaataaagaatgatttaaaaaacatgctgttttttactggattaaccatagtaattatggttattgatgctgggtttggctcatatttaatgaaaagcaatgttatgagttatgactgtataattggagctagatattatggagtgggaaatgagtatcaaggtgtggcaatcggtagtgcaatatttacatttgcaattttacttacatataaaaatataccaaagtggtctataatagttttttctttggttatcttaattacaagtgcatctccaattatgggagcaaatgttggaagtgctatttctgaatgtgttgcatttttactatttatactattgatatataatgtgaagatagacttcaaaaaaattgtattattaggtatagcagtattatttgtattaggagtttttgtagcaatagatatgattttgggaagtaattcacatttaggtatgtttgtaaaagaaatttactttaatggaccaggagaaataatacaaacatttagtagaaagatagagatgaatttaaagctagctcaaaccagtgcatgggtaaatatactgttaactggaataggtgtaattttagttcttatgattaatcagattagatactttaagcaactgatggatgagtatccaattgtatttaaaggatttatagcatcaatagcaggatgtttagtaactcttttagtgaatgactctgggattgtgtcatcagctacagcctttatttatgtaattgtacctatgataacattaagtataaatctcacagcattaaaagaataagtactgtatgaataatatgtaaatatgaacacattaatttaacttctttatttacaaaataaagaagaaagtttataaaaaataaattataataaaaaagagtttacctcaaaattgattattctaatcaaattttaaggtaaactttttttattataaagataaataacatataacctcatattttaggtagatttttttcttatatgtttaggagtgcatttaaatttttccttaaaaattctgtaaaataattttgtattagtaaatccatgagcttctaatatactgcataaggtatcatttgtgttaattaagtctttataaatatgagaaatacgcacatcatttaaatactctaagtaagtttgtcccatatactgtttaaattttctacaaaaatattctggctgtaagtgtgctaccttagcgattttgttaatagaaataggcattttgtaattaatctttgtatattctaaaactggttcaaattttgacaaatcaagtactgtttttttcatatttttattacctacagatattttaaagtttgtatataattcaaataaaagttcaaataataagcttgtaaagagcagattagctgcaggaggagagctaagtttaatttctctcatgttttctaatataagtttaactttacctgaattttttttatagttattgtcattggcattaaccttaaagtcaaaatagcaatttttaaaatcagggatatatttgtttagaaaagacaatggtacttgcaataatatagaggtatcttgataagtacatctagttgagtgaataattccagaattaatgaacatacactcattagcttttaaattataagtgtaaccctccatgttaatttgtaaatcaccagaagttatataaattatttctaatgagttatgccaatgatttgctacataactaccactatcatcaaatagtttgaaattaacatctaaattatcaataggttcaattatttcatgtgaaaaattatttctgttcataataatatcctccttataattttaaattataaatagtaaatttataatgttcaatattaaaaagataatatagactaataaattagataataaacatacttaagaaaacggataaaatcaaatataataactgtatattaaaataacttaaaaaaattattttattataagtgcaaaatatacctatttaaataagataagaggggaggattttatgtgtatataaaaggtgtaaatttaggaggttggttagttttagaaaaatggatgacctcaagtttatttgaaggcacagaagctgaagatgaatactatttaccaagacagctttcaagagaggcatatgaatctagaattaagactcatcgtagtgaatacatcacagagagagattttgcaacgattaaatctatgggatttaattcagttcgtataccagtaccatactttatttttggagattgtgaaccattcataggatgtgttaaagaacttgataaagcatttgcttgggcagataagtatgggcttagtatattgatagacttacatacagttccaggaagccaaaatggatttgataatggaggaatatcaggtatatgtagctggtcacaaaatccagaatatgtagcgtttacattaaatgtattagaaagacttgcaaaacgttatgggatgagacatgaattgtatggaatccaaattttaaatgagcctataacagaaagaatgtggaacataatgaatgttccaaatcggtttaaggctgtagataaggagatggcaagggggagtaaacctaattcattagagtttttacgtgatttttatataaaagcatataaggtaatgcgtccttatatgagagaggaaaacgttatagtgtttcatgatgcatttgaattaaaagcatggaaagactttatgagagaggaagaatttaaaaatattgttctagatacacaccaatatttgatgttagctgaatcagatggatgtgaacaaagtattgatagctatctcaaatatattagagaaaattatgctaaagatattttacaaatgcaaaaatattttcctgttatatgtggggagtggagcttatttaattcatatgcttgtggtatagatacaaatggaggtcaatcacctctaaatgggattgaatcaaatatagataaattatcaaaagacgataaaagagaattatataggaagatagcaaaagcacagcttgatgcatggagaaatggaagtggtcactactattggaattataagttattactagatacagttaatgaagaaggttggataggatgggatagttgggacctaggcaaatgtgtagctcaagaatggtatcctatagaatattaaactaaaattggaggaaaagatatgattaaaaaccctatacttccaggttttaatccagatccttgtatttgtagaaagggagatgattattatcttgtagtttcatcttttgaatggtttccaggtatacctgtttatcactctaaagacttaaaaaattgggagttatatactcatattttgacagatgaaacaaaaatagatttgaagaagcttccttcatctaaaggaatttgggcaccttgtttgacttattgtgaagaagaagatttattttacatagtttatggaattatgaactctatgaatgcaagatattttgatgttgataattatttaattacatcaaaagatataaagggagagtggagtgaaccagtatatatacactcatcaggttttgatgcgtctattcttcatgatgatgatggtaaaaagtggattgcatcattagactgggagactagagaaggatatgaaaaacctggtgttatatgtttagtggaatactgtacaaaaaagaaagaaatagtaggatatccaaagagaatatggtcagggggaactgatagaggttgtattgaagcaccacatataacaaagcgtggagattactattatataatgtgtgcagaaggtggaactggatatggtcatagtgtaactatgggaagggctaaaaatatatggagaccttatgaaaaagattcaatgaatccaattgtaacttcaattccaggcgatttttatgaaagacatgaccctgaccatctaaagcctaaatactataatccagaatcaaaacttcaaaaatctggtcatggaagctatatagaaacaacatcaggtgaagtatatttagttcatctaacatctagaccatttgtaccagagttaaggtgtactttaggtagagaaacagctattcaaaaaatgaaatggacaaaggataattggcttcgaatggaagatgaaagtaatttggcaaaagaatacgtatcagaaagtaaactagaagaacatttagtttcatctataccaagttttgatgactttgattcaaatgtattaggtttacagtactatgctcctaggatttcaccattatcatttgcagatgttaagtctagaccaggatatgtaaggattagaggtcaagaatcaagaacatcattaaataaagtaagcatattggcaagaaaattaacttcagtatatgcaagaataaccactaagatggagttttacccagaggtacatcagcatagtgcgggtttgataatgtattatgataatatgaattatataaatttaagaaagtattatagtgaaacattgggtcaaagtgcactatcaataatacatcttgaaaatggagagaagacggaatttttaaatactaggataccaataaaagatataccaatatatcttcgtctgtatatacaaggtcgtaagtcatattttgaatggagttatgatgaaaaaaactaccaaagaataggaaaggtatttgatacaactaagttttcagatgagtactgtaaatatggagaatttacaggtacgtttataggattaacttgtgcagatcgtgtaaagcataaacactatgctgattttgatttttttgaatatatagcagatgaatcaaaagatgtcgattaataaaatcattactaaaattttcagagcaaaggtaaatcttatgctctgaaataagaaacattagaaggcaaatcttacaaaaaggagtatggtattatgaatacagaagttaatgttaaagcaactacgattagatatgaaaagatttcattttttgaaagaatttcttatggttgtggggatttggggtgcaatatcatatactcagctatgtcagcatttttgctgttttattatactaattatgcagatgttagtgcagcagctgtaggtagtattatgcttgtatctaggatactggatgggtttagtgacttaacaatgggaattatagtggatagaactaaatccaaatacggtaaggctaggccttggattttgagaatggcgattccttttgctatagcagcagtattattattttctgttccatcaaatcttggtatcacttctaaattaatttatatttttattacatataacttagtttctactgttatttatacagcaatcaatgtaccctatgcaactctaaattcacttataactcaaaaccagtatgaaagaggagtattaagtatatttagaatgatattagccacttgtggtaccttactaataaatggacttacactacctctagttgaatactttggaaataatttatcagcatggactaaaacattctttgtatttggaatagcatctataatggtattttttataacatttactggaaccaaggaaagagtaaaagcagttaagcaagataggaatgaagtaataccatttaaaataggtattaaatctttatttagaaataagtactggatacaaataacattatgtttagtttgcatatttattgtatttgcgataaatggtggttcatccgtatattatgcaaagtttattttgggagatgaaaaattatttggtcctataaatatggtttcaaatatatcccaaattatagctatgtttatggttgctccttttataaaaaaatttggaaaaagaaatgtattaatagtaggttcaataatattaatatcgtcaaatgttatgtttataatagttggacaaaactatataggagtaatatttgcaagtgctataaagggaataggaagtgctggaatagcatcaacaatgtttgctattgtttcagatactattgaatatggagaatggaagactggatatagaactgaggggcttataaatagtgcatctagttttgggtttaaagtgggaaatggattaggttcagcaatattaggtgcagtattatcaattggtggttatgtaggaacatcagctactcaaagtgatttagctatagtatcaataaaagtatgttttatatacctacctatatttataacaatattacaaattatcataatgtttttttataagcttgataaagaatatagtactatacttaatgaattaaatactaaataatgaaaaagtttcttataaagtcttaagtttaattaaggtctattgtaaatgttccctataaaaactattatatatttatgattattgaagaatttttagagaagcgaataataaaaatataagaagactttaaatgatgaaatggttggtcttttagaaatgatttaataagttatttttatttaaagcattataagtggacaattaatttttaatttatggagatgatatttaacaattagaagtaatatataatatgcgctaagaagcaatttttcaactatttatgaaggtggtggtacaagaaaagtatcaccttttttttgttatacaaaaaaacagttgactttttatatgaaccccttctataatgttactgaaattaagtaaaatgattgaacaaatgtaaagataattgaaaagcttgattttggaggaaatcaaatgaaaaaaattggagacttaagattaatgatgaagtgttgttcactttattacgaagataatttgaatcaacaggaaatagcaaatcaattgggaatatcaagaccaacaatatcaagaatattaaaagaagcttttgaacaaggaatagtaaaaatacagatagttgatgttttgaaaaatgattaccaaaaaatagagagaagtttggagagaaaatataaattaaaagaagtaatagtagtagatgataaacaagatgcactaacacaaaaacaagaactagcaagagctgtatctgaatatttaactagagtagtaaaggaaaatgatataataggtgtttcaataggaacaacactaaaagaaataccaagatatgtggaaaaaagtaactgtaaaaatgttacatttatacctctattaggagggattggagacaatgaaatagatattcatgcaaatcaaatagcagtaagtctagcgagggcttttggaggtgattttaaattattacatgctccagctgttatgtctgacttgtctacaaaagagaaactttgcaaagacgaaaaaattaaagaagtactagatttaatagataaaacaactatagcaattgtgggtataggaaatcctatgagtttaaactcaacaataatggcttctggatacatgaatgaagcagatatagaagatttaaaaaaatacaactcaataggtgcaatttgtttacaagcctttgataaagaaggaaaaacttctatacttgaatttaatcaaagagtattaggagtgaaactggaagatttaaaaaagataaaaagaacaataggtgtcgcttcaggagatgaaaaaatagaggcaataaaggcatcattaaaagcgaaatttataaatagtttagcaattaatcacagtttagcacttaaattattagaagattgtgactaatagaaagatagataaaagttaacaggagggaatgtatatgtcaatatcaaaagaaacattgcttgaaatgtataagagaatgaatcaggctagaaaatttgaagagaaagttagttggttttttgcaagaggtatggttcatggaacaactcacttatctgtaggtcaagaagcgtcaagtgtggcggctgtaatggctttagaaaaaggagatttagtatcattaactcatagaggacatagtcaatttataggaatgggaatagacctaaataaaatgatggctgaacttatgggtaaagaaactggattttgtaagggaaaaggaggctcaatgcatatagcagatattgagtcaggtaacttaggagcaaatggagttgtaggtggaggtcttacaatagctccaggagctgcacttacacaacagtataaaaaaacaggcaaaatagttttatgtagttttggtgatggagcatcaaatgaaggtacttttcatgaaggaataaatttatcttcaatatggaaattgccaataatattttactgtgagaataatttatacggtatgtcaacaagcataaaacgtcatatgaatatagaaagtattgccactagagcagcttcttatggaatagaaggaatatcaatagatggatataacccaatagaagtatacgaaacagtacaaaaagctgctgagaagtgtagaagaggagaaggacctgtattaattgaaagtagaacttatagatggttaggtcattcaaaatcagatgcaaatgtatatagaacaaaagaagaaatagaatcatggaaagcaaaagaccctattgaatttttaaaaaattatcttatagaaaataatctatctaatgaagatgaattagataagattcaagaatttgcaaagcaatcaatagaagatgcagtagagtttgctcaaaatagcccaaatccaaaaatagagtctttattagaggatgtatatgcagactaagaatggtaaaggaggaaaataaaaatgagtacaagggaattaacatatgcacaagcaataaaggaagcaatgtcagaagaaatgagaagagatgaaaatgtaatatttatgggagaagatataggaatatatggaggggcatttggtgtatcagttggtatgatagatgaatttggaccagaaagagtaagggatactcctatatcagaagcagctatagcaggagcggcagcaggtgcagcagcaactggtttaagacctattatggaagtaatgtttatggactttgtaacaatttctatggatgcaattgtaaatcaagcggcaaaaatgagatatatgtttggaggaaaagcacaagttccaatggttgttagatgtccaggtggttctggaactggttcagcagagcaacattcacaaagtttagaagcttggttttgtcatgtaccaggagtaaaagtagttgcaccttctacaccagcagatgctaagggattgttgaaagcagctataagagataataatccagtcatatttgttgagaataaattgttatacagaaaaaaaggttttgtgccagaagatgattatgtaattgaaattggaaaggcagatattaaaagagagggtactgatgttacagtaattacttatggaagaatgttacaaagtgttgaagaagcagcagagactctatcaaaagaaaatataaatgttgaaattatagatttaagaactttatatccattagataaagagactatagtaaagagtgtatgtaaaactgggagagttttaatttgccatgaagcagctaagactggtgggctaggtggagaaatatcagccctgataacagaaagtgaatcatttgattatttagatgctccagtaaaaagaatttgtggaaaagatgtgccaataccatataatccagagttagaaaaagcagttgtcccaagagttgatgaaatagaagaagcaataaaatctttaattgttagataaggagggatagatatggtggcaaataaaataaaagccacaccagcagctagaagtcaggcaagaaaagacaatataaaattagataggctgattggaagtggagaaaatggaaggattcatttagtagatgtgttaaattatttaaaagataataaagcaaatactactcctttagctagaagaatagcagaagatttaaatatagatttagaaactattgtaggtactggatatagtggaaagataagaaagtgtgatgtggaaaaattaactgcaaaagaaactattgtatcaaataatacatctaaatatagtgagaaaaaagagctgaaaattgaaaatgaaaattcaagcatgtttaacacagtagaaggaatatttgaaaagccaaatccaatgagagctactgtagcaaaacgaatgtcagaaagttattttagtgctcctgtatttacattcaatatagaagtagatgctacagaattgaaggtacttagagcaaagttaatcgacacagtaaaagaatcaactggagtaaaattaactatgacagatttaatagtaatggcagtatctaaaatacttccaaatcatcaagccttaaattcagcatggacagatgagggtatatttagatataaagatgtaaatatagctattgcagttggtttagatgaaggcttatatgttccggtagtaaaaaatgcaaacaaaaagtctttaaaagaaatagcaaaagaaagcaaagaacttgcggaaaaagtaaagacagggaaacttatgccagcagaccaagaaggtaatacatttacaataagtaatgttggaatgtatggtataactacatttacacctataataaatatgccttcaagtgcaatcttaggggtaggtgctacacaagataagtttgttccagtaaatggagaggctaaaataaaacctataatgaacttatcattaacatcagaccatagagtaatagatggaacagtagctgcaaaattcttaaaagatttaaaagaattgttagaaaatcctttatcaatgcttgtataggttttgatatttcgttactgatataaatagtttgaatagattatattattataattgtttcagtaaatttaaagcttttatatattaagaattatttttaacagtaactatatgtgaatatgatttgcttaattaaaatatatgaaaataaataggaggagagcctatgtcagtagaagtaataatgccaaaagcaggagtagccatggaagaaggtactatagtatcttggctaaagcaagaaggcgaagaagtaaagattggagaacctatactagaaataacaacagataaagttaatatggagatagagtcagaaggagaaggtacacttgctgtaatcatacataaagaggaaggtgaagtattaccagtatttacagtaataggtgtaatagcagaaaaaggggaaaatcaagaggaagtaaaagctaaatatttatctggaaatgtttcaaaagaagatatagttgaagagaatcaaaatatagaagttaaagaagaaaaaataaacaaaaaagagtgtaatcatgattatgatgtagtggtaataggaggaggacctgggggatatttatcagcattaaaagcagctcttttaggtggaagagttgctttagttgaagaaaatatactaggaggtacttgcttaaatagaggttgtatccctacaaagacttatataaaaacagcagaaatattagaagaaattgaccaattatcaaagagaggtgtaaaagtaactgtagataaagaacaggacattaagaaggccataaaatataaaaatagagtagttaaaaaacttacagctggtgttggcggattattaaaaagtagagatgtagatgtgtttaatcttaaagctagtgttaaagaagagcataaagtaattttatcagatggaaaagttttagatacagaaaatataataattgctacaggttccaaagtaaggatattacctataaaaggaatagaatcaaatttaataataactagtacagaagcattagatttggaaacagtgccagaagaattagtaataattggtggtggagtgattggttgtgaatttgcagagatattcaattcaagaggttctaaagtaactatagtagaaatggaagatagagtaatcccaagaatggataaagagttaagcgaatctttaaaatattctcttagtaaaaaaggtataaatgtattaactaaaaagaaagtttctgaatttaaagaagaaggaaataacatattagtgtgcattgaaggtgaagtgccaataaaagcagatttatgtctatatgctataggaagagaagctaatctttctggcatagaggacttagatattaaaatagataaaggttcaatagttgtaaatagtaaaatggaaacaagtataccaagcatatatgcagtaggtgatgttactggaggtgtaatgttagctcatgctgcttttaaaatgggagaggtagcagcttcaaatgctctaggtgtgaataaagaagttgacttaggtgcattacctagttgtgtttatacaattccagaagtagcatcagttggtattacagaagaggatgctagaaaaaaatataatgtaaaagttggtaagtttaattttgctggaaatggaagagctttagcttctggtcaagaacaaggatatgtgaaagtagtagcagatgctaaatatggagaaattttaggtatacatatgtttggatgtggtgtagcagaacttataaatcatgcagcatcatttaaagcattagagatacctactgatgaagcaagtgagttgatatttggtcatccatgtacttcagaagctttaatggaagctttggcagatgtaaatggagaatgtttacacttacctaaaaaataaatctaaacataaattattaatttaagtctattattaatattaatttatatcataaaattttaaaacacttacttagccataccccttattatgcaaataatttatttgtataataaggggtattttttatggaaaaatatagaatatagaatccttgtagtttttgttgtacaaaaaagatagtaatataaaataacattatcattttagaatgatttcaattgtaattaggaaaagtgatttttttgtttttaaaaaaagtattatttgtaaaatataaaaaaaaatttcttaatatttgaataaaagaatagcttaatttaaatgttattactttataaaaaaataataagtacaaaaaaaacaatatatggcatataagttgctatataaataataaggagggaacaattataaatgaggcaaagaataaaaaacttaattgaaaatgaagataagaaaaatcctttaacagatgaagcgatttcaagtaggttaaatattcgaagagaagatgttacctttttgagaaatgagttaaaaatagaagattcaagacaaagaagaaaagttgttttaattaaagctataaaagatattttaaaagaagaaaaaactataaataaaaatgatataacaagaagattaaacagcattgggtttacagtatcaagatttacagtcatacaatacttaaaagagattcaagattctggtgacctaaaacttgataaagagagtgatgataaaaaagaagaaataatcaataatagagaaaataaagatatagcatttgataaactcataggtagtagtggtagcttaagtacaattataaaactagccaaagcagcaattctttatccacctcatggtcttcatactattattatggggccaactggtgttggaaagagtgagttagcagagtgtatgtataaatttgcagtagaatcatccagattccctaagaatgcaccatttatagtttttaatgcagcagattattcagagaatccacagcttttgctatcacagttatttggacacgttaaaggtgcttttacaggagctgatgagaacaaagaaggattagtatcaaaggcagatggaggaatattgtttatagatgaaatacatagattacctcatgaaggtcaagaaatactatttcaactgattgataaaggtatggtcagaaagttaggagaaacaagactaacacataaaatagatgtaatgattatttcagcaacttctgagccaatagattctcatttacttaatacatttaaaagacgtatacctgtaacaattgaaataccagaattagttgcaagaccattaaatgagaggtttgacattataaataatttcttcttaatagaagctcaaagaatgggagcaaacatacatataaagtcagatgtattaaaagctcttatgctttacgattgtataggtaatgtaggtcaacttagaagtgatattcaagtagcttgtgctaggggactattaaaccaacttacaaacaaactaaaagaagtaaatataagcatatcagatgtacctggatatgtaaaacaaggtcttataaaaatcagaaattgtagaggtaaaatagaaaattatgtagatggggatttaattatagattcaaatcttcaaggtgagatagaaaagaaaaatgaagatatatatacttttccagatgaaatatacaaacttactgaaagaagacatattgatttattggaacaaggtttagattttgatgttataaatagaatcattggaggagaattagaaagttgcattcaaaaatacataaaacaagttaaaaaagtttctattagtaacaatcttccagatataagtccaattgttggaaaatatatcgtagagctaacttatgaagtaatcaaaatagcatcacaatacctaagttcactagaaccgaatctacatttatgtttagcagttcacctaaaagcagcttttgagagattaaaagaaggaaaagtaatatcaaatgctcatttgaaagaaataataggaaattatccactagaatattctgtagcagaaaaggtagctcaatatttaaaggaaagatataatataaacttaccaaaagaagaaataggtataatagcaatatattttaaaatgagtagtagaagagatatgtctgaacaaaaaaagataggtgtacttcttatggctcacggaagagtagcatcttctgtatgtgaggttacaaataaactattaggaattaatcacgcaaggtatttagatatgccatttgagaagaagccggaagaaatgattgaagaagctactacaataataaaagatattgatgaaggtagaggtgtgattatattagtagatatgggttcactttcatattttggagatattatttctggaaagactggaattaatataaggacaatatctagatttgatacattgctttctatagaggttatacgaagagcagttttaccagatttaacaatagacgagatagttgatgaagttaaaggtatagagccacaagtaaaagaaaaggttagtaaatgtaacaatacaaaagtagattttagaaaacctataattttaacattatgtattactggattagggggagcttgtaagataaaaaaaatcctagaggaaaatattaaaagtataactgaaaaggttgatatagaacctataggtatgattgaatatccaagtcttgatttagagataaaacaaataagcaatgataaaaatgtaatcgccatagttggaacaattgaccctcagatagcaaatatccctttttttagtctagtagacataaatgataaagcaaagttaaatcaaataaataacctaattgatacaaatcaaattggtgaaacaaataaaaaatatgaattatcagatttaatacataaagaagatatatttgtggatttacaggttaaatcaaaagaagaagttctaaaatatatgagtaaaaaacttagagagaaaggttatgtgacaaaaaatttctataaaaaagtagtggaaagagataacttatttccaactgaattatcagatgaaatagcaatacctcacacagatggaatagatgtaattaggccagctataagtatagccatcttaaagaagcctattgtgtggagtaaaagtaaagtaaaaataatacttttattagctgtagaccaaaagtgttttaatccattaagcactctactctcatttatagaaacagatgaatttaagaagataaaaaacattaaagatagagattttattagggagatgatattagatggagtcaatgaaaataattagtagcaatttaatttttaaaaatattgaagtgtctaacaatgaagatgcattaaagtttttgggacaacgtttgtttgacgaacagtatgtaaaagaaagctacatacaagctgttgtagcaagagaaaaaaagtatgctacaggattaccaacagaaatatacggagtggcaataccacatacagatatagtacatgtaaatgagccaggaatagcaattggaatactgaataaaccagtaaaatttataatgatgggtacagacgatactgaaattgatgtaaaagttgtatttatgttagcagtgaaagagccacaagaacaattgcaactattagaaaaacttatgactatatttcaagataagaatatactaaataatattgttgacttaagtgaagaaagtgtgagtgatttattaaactctaaattgaaaaattaaacatgtaaagtatattaaaaatgtaaaattaaacatgcaaagtatgttaaaaaatataaaaagattattaaagatttctaactatagatatctttaaaataaaataatttcaatgggggtgactaatgtgactaaaaagatattagttgcatgtggaacaggagtatgtacttcaacaattgctataaacaaattaaagaaagcacttcaagacattggtaaattggatatggttaatattacacaatgtaaagtagtagaagttgcatcaaaagcacctgattatgatttaataatttgtactacacaagtatctagtagtataaaaacaccagtgataaatggattaccttttttaactggtgtcggaatggataaattaatcaatgatgtattagaagagttagaattataattaaaaaaattaaggaacatggtctctaaaatcataagttttagagacttaaaattaaataatggagggtctttatatggagatattaaatttcattgttggtctaggtgcacaagtaatgatgccaataataatatgtatttttggtttgatattaggtacaaaactaggaaaatctttaagagctggtttaactgtgggagttgggtttataggtcttaacactattatagctttgctaacagataatttaggtccagctacacaacaaatggttaagaatttagggctaagtttatcaataatagatgtaggatggccagcagcatcagctatagcttttgcatcaacagtaggggctttaattattccaataggtcttgtggtaaatatagttatgctaattactaatactactcaaactgttgatgtagacatatgggattactggcattttgcttttacaggagctttagtggcaggggctactcaaagtgtaatgtggggagtatttgcagcagtagcaaatatggtaattgtattggtaatggcagatttaactgctccaggtatagaggaatatttaggtatgccaggtatatctcttcctcatggatttacacaggcatttgttccaattgctatagtagtaaataaattattagacctaataccaggtataaataagattgagataaatgctgatacattgcagaaaaaatttggattatttggagaacctttaataatggggtctgtaataggtgtaataattggtattgctgcgaaatatgatataaaaggaatattacaattaggtgtaactatgggagctgtattaatattaattccaaagatggcagcattattaatggaaggattattaccagtatcagaagctgcacaggaatttattgagaagagatttaaaaacagaggcaagatttatataggcttagattcagcagtaggaataggtcatcctgttacattatcagttgcactagtgttggttcctttgactatacttatagcagctatattgccaggaaataaagttttaccatttgcagatttagcagtaattccatttgcacttgtattaatcgtaccaattacaaagggaaatgtgtttagaacattaataataggaataattataattacttctggattattaatcgcaactaacttagctccattatttacccaaatggctttaaatgctagctttaaaatgcctgaaggagcaactatgatttcaagtatttgtgatggtgcgaatccattaagttgggtatttgtaaaagttatgaactataaagttattggaggagtagtttttggagttatagctttaggaatggctatttacaataggaatagaataataaatgaaaataaaaagctatctatagaagaataaggttaaaacaattttattaaggagtgtataggttatgaaaaaatataaatatgattctaaaaggtacttactcagtgttacaataccaggattttttatgattttaatattgatttatgcactgtttaataactatataaattttaatttgaatatatatagtttgttaataattgtctgtacttatggtatattcaatacttttatatcatcaagtaatcctaaaaaaattattattgacagcaaatgtatacattttacctcatttatgactacacataagtatgaaattaaagatatagaaaagataagaataagagaattttataataaaaaaatttatctaaaaattaatgatggagacctttttaaaggtaggtattggataagaacaaatatgtttaataatagtatagcattatatagttatttcattgagttggaagagtgcttatatccagattcactaagatttagaaataaaaaatttgagaataagaatatataaaaataaaaaattgaattgaagcctaacttaatcttttttgataagatataagtttgaactttatactaaatttttagaattttcaatcaagacaataacataatagctaagcaattagaacacaactaagatgtataaggcatgtatatgatgaatgggaggatttaattaatgttattagagaaattaagaaaagaagtattacaagcatctttagaccttttaaactataatttagtgacattaacaggagggaatgtaagtgggagagatgaacaaactggctatatagcaatcaccccaagtggaatggattatagaaatcttacaccaagtgatattgttatagtagatgtagatggaaatattatagatggaaaatggaaagcatcagtggatttatcagaccacttgtatatatataagcatagagaagacataaatagtataattcatacacattctacatactcaagttgttttgctattttaaatgaacctatagaatgcgcaagtacaactcttgcaaatgaagtagggggttcagtaccagttgcaaaattttcaccaccaacatttaaaaagatgggaaaatgtgttattgaagcaattggtgacaaaagagcatgtcttttagcaaatcatggcgtaattgcagttggtccatctgtaggacatgctcttacagccgctgtaatgttagaagattcagcaaaagtatattacttagcaaaatcaattggcacaccagtgctactgcctgatgaagaaattcaaagagcgagagatgtattttttaatgtctatggtcaggataaataaattagataaaattttaaaagtaatatgaaaatatagatattcaatgatattaaggagatttataatgatataataagtttaatagttaagaagtaaaatatgaaatgtaatagtatataaattcatttaagactaaaaataataagataaaataaaaaggagtctgtatttctatgtattacttattaaacaaaagcacaaatccttactttaatttggcattagaagaatatctatttttaaatgataaatataatgatgatattataatcatatggagaaatgaagactccatttttataggtaaaaatcaaaatccatatcaggaagtacatcatgatgttattgaaaagggagaaattcctattttaagaagaatatctggagggggcactgtttatcatgatttaggtaatatcaatatgtcattcatacaaaaagataggcaacttcatgagatagattttttggagcatactaagtttatgcaaaagatgctttcaaccttaggactagatgtatctataactgaaagaaaagatttatttttaaatgggaaaaaaatttcaggctctgcacagtctataaaaagaaaaaattctctttatcatggaactcttctttacgattcagatttaaataaattaactaaatatttaaattcaaataaagcaactgaatcaaatgcaactaaatctgtttcaagtaaagttacaaatattaagtttttactcgaaaaagatataaattactttttagattattgtgttgaatatttaaaatctaatataaagaatataaaagaacttgaattggatgaagaagatattaaaagtgtatacaatataggagaagataaatatagaaagatagagtggacatatggtaaaacgccgaaatttcaagtagtgctaccatttaataatgaaagtaaaataaatatacatgttaacagatggaaagtatcaaaattttttatttcttatgatgataatgtaattaatatggataagttgttagatttgaatttctttaaagaagaaataaaagagagtattttagaaaattatccacattacatagatttaatcaatttaatattttaatataaaacctctaatttgataaaattgtcttatatcaaactagaggtttttaatattcttgcatattaacaaccattacaaaattgtaaaattaaaaacaacactattgaaaaatcaatatatattgtaataaatatatgtgtttttcattagcaaatagacattaactatttatacaactgaaaatttaatatataattaatcagatggttaaaataaaaatattaaaagttttaataaatgatggttaaaaataaaatacgaggtgataccatgtacagtgttataattgttgcagcgggaagcggaaggagaatgaacttagatataaacaaacagttcataaaattaagagaaaaagaaattattgctcatacaattcaagttttttatgaaaatataaatatagatgaaatagtggtatgtataaaaaaagaagaagaggatttttttaaagaaaatataataaataagtataactttaaaaatataaaaatagcatatggcggaaaagaaagacaggactcaatatataatggtttaaaaaaattagatgaaaattgtgatatagtacttatccatgatggagcaagaccatttgtcgaccatagaataatcaacgaatctataaaggtagctaaagaaaaaaaggctgtggttgtaggtgttccagtaagtgatactataaagatagtgtcagatggaacagtacaagaaactccagaaagaaatttgttgtgggcagcacaaacccctcaaacctttgaatataatctcataatagatgcttatgagcaagcatataagaacaattattatggtactgatgattcaatgttggtagaaaatataggtcaaagtgtcactatggtaatgggttcttatgaaaacataaaaataactagtccagaagatttaaatatagcagaacaaatattaaatatggaaaaaagagatgaagttaacagtagaaggagaattatatgagaataggattaggatatgatgtacacaaattaacagagaatagaaaacttataatcggtggtgtagagataccacacgataaaggtttgttgggtcattctgatgctgatgtattgatacatgcaataatggattctattttaggtgctctagcattaggagatattgggaagcatttcccagatacagatgaagaatataagggagcagatagtatgaaattattagaacatgtgtataatctaataacaagtaaaggatataaaattggtaatatagatagtactataattgctcaaagccctaagatggctccatatattgagagtatgagaagtaatatatcaaaagttttaaacacagacattgataatataaacataaaggcaacaacagaagaaggtcttggttttacaggagcaaaacagggaatagcttcacaaagtatttgtttattattgttgacaagtcagaataattaatatattattagtaataagtttaatggatatcaagtaataggcctatatagaatatctataatgtatgaatttaagtgaaattaatataaatataaaattagctatgataaagaaatagtaaaatgatgaaatcttcacagagagaaaacggtggtgagagttttcaagaggaagtctttgaacctgtcttttagcttaaaggtataaaaatctttacggtaggaaccgttatattcccaaaagagagctattcatatagctaactagagtggtaccgcggaaattaaacctttcgtctctatacttgtatagagatgagaggttttttatattttcaggaagttaatattcaggaggaatctattaatgaaaatgtcaaaaatgtttatgccgacattaaaagaaatcccagcagatgctgagattacaagccatcaattaatggttaggtcaggcatgataaaaaaaatgacttcaggtgtttataaccaattaccaatggggttaagagtgttcaaaaaaattgaacaaataattagagaagaattaaataaaaaagattgtcaagaaatactttgtgcagccttacttccttctgaattatggaaagagtctggaaggtggactgctatgggtgaagaaatgtttagactaaaagacagaacagaaagagagtactgtcttgggccaacacatgaagaagcattcactgatataataagacaagaaattacttcatataaacaattgccactgaacttgtaccaaatacaagtaaaatatagagacgagagaagaccaagatttggtgttatgagaactaagacttttacaatgaaggatgcatatagttttgatgtagatgataaaggtttagataagtcatatcaagatatgtttgatgcatatgtaagtatatttgatagatgtggattggagaatagccctgtacaggcagattcaggagctataggaggttctacatcagccgaatttatggttaagtcagaagttggtgaagatgaagttgtattttgtagtggatgtgattatgcagccaatgtagaaagagcagaatcttgtaatctagcatcacaaaaagaagaaatgaaagaattagaagaggttcatacaccaggagcagctacaataaaagagttagaagaatttttaaaaacttctccagataagtttgctaaaactttagtatatgaggcagatggaaaaacagttgtagtcgttgtaagaggagatagagaagttaatgaaatcaaagtatctaatgctataggttctgttatagaatttgctcttgctacagatgatgtagtgagaaaagtaactaatgcagaagtaggatttgcaggtccaataggtataaatgctgactatgtatttatagataaagaaattgttgaacaaagaaacatagttgttggggctaataaaactgagtaccatataaaaaatgctaactatggaagagattttgaaggaatagttggagattttagaaatgttcaagaaggcgaccagtgtatagtatgtggtaagccacttgaaatagctagaggtgttgaagtaggacatatatttaaactaggaactaagtactcagaatctatgaatgcaaacttcatagacaaagatggaaaatcaaagcctatagtaatgggatgttatggaataggtgttgaaagaacagcagcagctataattgaacaacataatgatgagaaaggtataatatggcctttgtcagtagctccataccatgttgtgatagttccagcaaatatgaaaaatgaagaacaaatatcaatagctgaaaatatatataatgatttgcaagctatgggtgtagaagttttattagatgacagagatgaaagaataggtgtcaaattcaatgattcagaattaataggaatacctatgaggattacagtaggtaaaaatattaatgaaggtaaagtagaatttaaacttagacataaagaagataaagagataattgacatagaagaaataaatgaaaaagtaaaggcagagtttatcaggaataatgttaggttaggataataacttaaataagatattgtatagataatcaaagttgtactttatagacaccattttatctatatataaggatataaaatggtgtttttttataaaacaaataaatgaggaggtaattgaaatggcaaaaaatgaaaaacaatttgttgaagaaataacaaagatggaagatgattttccacaatggtacacagatgtaataactaagactgacttagttgattatgcaccagtaaaaggttttatggttgtaaagccatatggatatgcattatgggaaaagatgcaagaatttatggataaaaaatttaaagaaactggacataaaaactgttattttccattattaataccagagagtttattaaacaaagaagcagaacacgttgaaggttttgctccagaagttgcatgggtaacacatggaggaaataaaaaattagaagaaagattatgtgtaagacctacttcagagactataatatgtacaatgtatgcgaaatggttaaaatcatatagagaattaccatatctttataatcaatggtgctcagttgttagatgggaaaaatcaactagacctttcttaagaacatctgagtttttatggcaagaaggtcatacattacatgaaacagcagaagaagcacaagaagaaacaatacaacaattagaagtatataaagcgttatgtgaagaattacttgcaatgccagttgtagctggtcaaaaaagtgaaagtgagaaatttgcaggtggtgaaagaacatatactatagaagctatgatgcatgatggtaaagcattacaatcagggacaagtcacttcctaggtcaacactttactaaggcttttgatattacttttgcagatagagaaggaaatttagctaatccataccatacatcttggggagcatctacaagacttataggtggacttataatgactcatagtgataacagaggtttagtattaccaccaagagtagctccaattcaagttgttatagttcctatagctgctaaaaaaggaaatgtaatggagactgttgataaaatatatgctgatttaaaaactaagggagtagccgtagaagttgatgatagagataactatacaactggatggaaatttaatgagtgggaaatgaaaggtgctccagtaagagttgaaattggaccaaaagatatagaaaataatcaagctatggtatttagaagagatactttagaaaaggattctatgcctttagaaggattagctgatgctatatgtgatttatttgatgttatacacaatgatatgtttgaaaaagcaagaaaacatagagaagacaatacatctatagttgaaaatatggatgagtttagaaaagctttagaagaaaagccaggattcataaagactatgtggtgtggagatgcagaatgtgaagctaagattaaggaagaaacaggagcaactataagatgcttaccttttgaacaagaaaacttaggtcacaagtgtgtgtactgtggaaaagaagcagatagtatggtagtaatggcaaaagcttactaaaatacatttaaataaaaactggggtagaaagtatttaatactttatcccagtttttttgttttttatgagtaataaaatgtatttgtaactatgtcataagataagtcatagatacttatattaaaaagaatataatagagaactatttttaataattacatattaatgaaagcaaaatatttttgttatatagattttcaataaagcaaacaataaatataaatgaatattagtaaggagtgcttttaatttttagaaaataaatgacttaaaagaaagatttatgaaattaaaactaggattttctgatataataaacatgtgtatttttaaataaaaaggatattattattagatttgattaaaaataaacttgcaaaacaatgtactagtttaatattatagttatattgaataaaatatcaggaggaagtaaaaatgaatgtaagagtaaggtttgcaccaagtccaacaggatttgtacatataggtagtttgagaactgctttatataactatttatttgcaaaaaaaatgggtggagaatatatattaagagtggaagatacagaccaaagtagattagtagaaggtgctatagagaatatgcttaatgctatgaaatgggctggtgtcaaccatagtgaaggtgttatattagatgatagtggaaaagtagtacaaaaaggagaatatggtccatatattcaatctcaaagattagatatataccaagaatatataaagcaacttttagatagtggaaaagcttattattgtttctgtacaaaagaaagactggatgaagtaagagatgctcaaagagcagcaggagaaacagctaaatatgatggtcattgtaagaatctttctaaagaagaagtagaagcgaatataaaagcaggaataccatatgttataagattaagattgccagagaatcatacaattaagtttacagacttagttagaggagatatggaatttaatactaatgacctagatgaccaagtattaatgaaaacagatggatttccaacttatcattttgcagtagttgttgatgactatttgatgaaaattacacatgttataagaggagaagaatgggtatcatctactccaaaacatgtttatttatatgaagcttttggatgggaagcacctgtatttgtgcatttaccaaatatacttaataaagaaaagaaaaaattaagtaaaagacaaggtgatgtagctgttgaagactttaagaaaaaaggatatttaccagagggattagtaaactatgtagcattagttggttggtctcctgaagataatcaagaattgtttacaatggaggaattagaaaaagccttctctgtagaaagagtatctaaaagtggtggagtatttgatactgaaaaattaaattgggttaatcagcactatataaaagatggtgatgatgcttatctaacagacttagcaataccatttttagtagaagatggatttataacagaagaagaagctactaataaatatgatttcttaaagagtatgatatcagtacttaaagagaaattacaatatgtaaaagaaattactgaacatgcaagtatattttttggagataaaatagaggtagaaactgaagagggaagagagttcttaagattagaacatatacctactttaatagatgctttgagagaaaaaatagaaaaaacagaggtattaaatgctgagtttgttcaagctatgcttaaagaaatacaaaaagagtacaaaataaaagggaaaaatttatttatgggctcaagaataattttgacagggcaaatgcatggtccagatttaccaaaagtaatggaagttttaggaaaagaaacttgcttaaatagaatagcttatgtaaaaaataatatattatagtcataaaagtccgctaatttagaagcggactttttttgtgttagtatttggtgaaaatatctgcttaagaaaatgaaggtatttaaggtaataaatttaatatataaaaagcaaagcaaaaatataaataaaatatgaataataaactaataaaatattaagcatagaagaagggaatctattattttagtttgatttaattattaagggggtaattactatgtatagtaatattgatgatgttaaaaaggaattaaaggagctatgcttagaatatgttacaattttagaaaaattaaaagatgaaaaaatgattacagaagaaacttttgaaaagtgctcttctcaaaaaaaaatatttttagaagaacaatagaggatggtaatagtattattattatgtagtttgaaagatagtacgaaaaatgatagtaatactattatttattgcaattttcaactataatataatatataatgttaagaagataatttataaaaatacagtgaggtgatgagtgtgaaagtttataatacattgactagaacaaaagaagaatttgttccattagaagaaggaaaggtaaaaatgtatgtgtgtggtccaacagtttataactatatacacataggtaatgcaagaccatttataatatttgatactctaagaaggtatttagagtatagaggatacgatgtaacttatgtacaaaactttacagatgttgatgataagattataaatagaagtcatgaggagggaatatctcctgaagaagttgcggctaagtatataaaagaatattttgtagactgtgatgggctagggataaaaagagctactgttcatcctcaggttacagataatatacaacagattatagagtttataaaagagttggaagataagggatatgcatatgcagtaaatggtgatgtatattttgatacaaataaatttgaaggttatggaaaactttcaggtcaaaaacaagaagatttagaggcaggggctagaattgaggttaatgaccaaaaaagacatcctatggactttgttctttggaaggcaaaaaaagaaggtgagccaggatgggatagcccttggggagaaggtagaccaggatggcatatagaatgttctgttatgtctaagagatatttaggtgaaacaattgatatacatgcaggtgggcaagatttaacattcccacatcatgaaaatgaaatagctcaaagtgaagctagaagtggaaaaatattctcaaaatactggatgcataatggatatataaatataaatgatgaaaagatgagtaaatcaaaaggtaatttctttacagtaagagatatatcaaaattatatgatttagagatagtaagatttttcatgttatcagcacattatagaaatccagtaaactttagtgatgagatgttaaatcaagctaaagcaggtcttgaaagactatataatactaaagaaaaattagaatttacgctaagtaatttagtagaatctcctttaacagaaaaagaagtagagcttgttaaagaattagatgactttagacaaaaattcatagatgctatggatgatgatgttaatacagcagacgcagtaagtgtaatatttgaattagctaagttaataaattctaatgtagatgaaaattcttctttggagtttgctaaaaaatgcttagatgaatttaatgaacttacaggagtattaaatattgtaaataagaaaaaggatactgtattagataaagacattgaagaattgatacaaaaaagaactgatgcaaagaaaaataaagagtttcaattagctgatgatattagacaacaattactagatatgggaattgtattagaagacacaagacaaggtgttaagtggaaaaggatataaaaatggaaaaaactgaattagttactatgtcaccattagttttagcatacttaggtgatacagtgtatgagacatatataagagaatatttaattagacagaatacacaaagaaaagttaatgatttgcataaactagctataaagtatgtaaaagctaaagctcaggcaactataattcatgaaattgaaattgagttaactgaagaagagagtaaaatttataaaaggggaagaaatcaaaagtcaaatacttctcctaagaatgcagatattatagactacaaacatgcaactgggtttgaggcattagtgggatatttgtatttaaataatgaaatagagagacttcaatatattatcaataaaggaatcaaaattattgaaagagatatgtaaatattaaagagtgttgtcttaataataagtaataaggcaacactttttttataactaatgtataataaatatatagaaattagtaatgagaaaggataagaaagttatgaaagtaaaattaatatcacatacacctgaaccagaaaaagtaatagctatggcagctaagctatgttattcaccagttgggacagacgaaatagaaaaagatttctaaaatatattaaagagcattcctataacaaatactatggcggttggaatctatgagaagttatagatatagaattatgtaaattatttggaaaaaacaggtttgaaaattagccatgttggtatttctaggttacttaaggaagatcaaacataaataagctgagttgtcttaggtgcactatgtacaacattagaatgtgaagttgaagatttattacttcaaacgaacgatggtactaagaaaaacaatgatgaaatgattaattaataataaaggtaaggaggtagtatatgagtttagcagataaaatttttattgatatgtgtaataatattcttgaaaatggagtatcatcagatggagaggtagttagagcaaaatgggatgatggccagcctgctcatacaataaagaagttttgtgtagtaaataggtatgatctttcaaaagaattcccaatacttacactaagaccaacaaacttaaaagcagcaatagatgaattactttggatatggcaaaaaaaatctaataatataaatgatttgaatagccgtatttgggatagctgggctgatgaaacaggttcaatagggaaagcttatggataccaaattggacagaaacataaatacaaagaaggagaatttgaccaaatagatagagtgatttatgacttgaaatataatccttatagtaggagaattataactaatatatataatcataatgatttaaatgaaatgaatttatatccttgtgcatatagtatgacatttaatgtaactggaaatagattgaatgcaatattaaatcaaagatcaaatgatattttggtagctaataattggaatgtaactcagtatgcaattttagttcacatgttagcacaaataagtgatttggaagtaggcgaattggttcatgttatagcggatgcacatatatatgatagacatattcctctagttaaagagcttattaatagagaatcttatgatgcaccaaaattaataataaatccaaacataaagaatttctatgactttagagttgaggactttacattagaaaattataaaagtgggccacaaatcaaaaagattcctgtggcaatttagaaggagttatttatgaaagttatagtagctgtagatttaaattggggaattggttatggtggaaagttactacagtcgattcctgaagatatgaaattttttaaagaaaaaactgtaggtaatgtagttgtaatggggagagaaacctttaaatcattaccaggaaaaaaagcattaaaagatagagtgaatatagtcttgactagaagtaaatcttttaatgatgatagattgattgtttgtaattctatagatgaaactcttaaggaactacaaaaatatgaaaatgataaaatttttataataggtggagaaacagtatataaacaatttttaccttattgtaatgaactatatgtaacaaaaatacagaagacatatgaggcggatagatttttccctaatatagatattatgtcaaactgggatttgattaaagaaagtgaagtaaaagaatataacaatataagatatgttttttcaacatatataaataatagtttataggtttgtataggagagaaatttaatttatgaaaaaggatatatttgtaaatagagtttctaatgctttagaaaatgatagaggcgcagtttttgtaggtagtggtatatcgtttagttcgactgaagttgattggtttaaattactggagccattagtaaatgaacttgatataacattagacaataaaagtgatgatttacctatgattgctcagtacatagtaaataattattcaggaaatagagggcctttagtaaacgaaatatcaaaaacatttaatagaaagtttaaactaaacaagtatcataagtatttagcaacaactaaactttcaacaatatggacaactaattatgatatgttgttagaagatgcattttatgattttgatacatcggttaaagtaagtgatgattctattacaaggaatagactagaatatgatgtggaaattataaaaatgcatggatgtatttctagatccgattggaatgaaatagttataactcaagaagattatgatgatttttcaataaataaaccagctatatctcaaagattaagtgaagatttaataaataagtcttttctatttattggatatagctatagagatccaaatataagaaatataatgataaatgctagaaggctaagtaaaaaacatactcaacaacattatataattttaaaaaagttaaaagatagtgatagtaatattacgcaagatgatgtagtaagacaagaactttggtgcaatgatttaaaacgtttgggaatttcaactttatttatagatgaatactcagagttagaggaacttttaagagagataagtcaaaaatcaagaggtaaaacagtatatgtgacaggttctcataaagaaagcaatatgaatgcaagaaaattaggaaccaagctagcaaaacataaagatattactttactaagtggtcaatcatctggtattggctcagaggtagttgctgcgtttactgaagagtgtattaagagtaaagaagatattataaatagaatgaaaatatttcctaatccatattcagctgatgaaaaatactctgatgatattactttaataccagatttaaagaaatgtagaactaaaatgttgaattcaacacaagttgtagttgtatttagtggaggtataggtactgaagcagagatagatgttgctataaaacaaaactgtaatataattcctgttataacatgtaaagaggatagagagaatccagctataaaaaaaatcttaaactatagtgataatatgaaaaatatagaaataaaagatgctacctattataataaaatagtagatgaagatggtgttgtaacaatggaggaaatttatatatgcatatcaaaaataatgaattaaaacatgacattattaaattgaaaaaaagaaatggatttattgaagttggaaaagataaaaaaacgttggtaaactgtttaattggagcgaatgaattagaggattacaaatatgaaataaaaaaaatagattgtatacttaatatatcagaaaaaccagatatagtttcagatttaagtactaaaagaagaaaaataagtgaatctatatggtataagatagttaaagatacacctttcgtatctgctacactgcccatatacttagttagtaaaaataataataaaatagatagtaatgaattattagatataattattgagcagatggaaaatggagttgggatgataacgattcatccaacagcaaataaacaaatttttgaggattctaagaatagaatggtacctgtcacatctagaggtggaggtatggtaatacaagatttaatctcaaaaaatttttcagaagataatgtgtatttgaaaatattgccagaaattataaagtatgctcaaaaacataatgtttgtatcagtctaggtgcaacatttagatcaggaaacatatttgattctaatgatagagcacagataacagaaattaagagtcaaatagaattagctaagaggatatataaaagtaatgtcggggttattattgaatcaccaggtcattcaagaccaagtgacataattaaaatatcgtcaatattaaaaaaagaaggtttcccaattatgccactaggaccaataccaacagatattgcaataggaatggatcatatcgctgcagctattggtgctacaattatgggtatagaaggatgtgcaaatataatatcaactgtcacacgagaagaacatactggagggagaccttctattgaatccacagttgaatctataagaacagcaaaaatagctgctcatattattgatatacatcaaatgaatgatattaacttagatatgagtgtatctaagtctagagctaaatctaacacctgtatatttgggaaagatacaagatattgtgacagatgtagagaactgtgtcctttgtgcattagataaaaattatattcaagttaattcaataaaaaagattggataaaaatacatcgtatagctagtttttcacaacagagtcaaagatatgtcaaattagagcaatttgaatacataattcctccagaaatagaaaaaatagaaaaagcaaaagagttatttataaattcaatgaaaaaataccaagaggattatgataaattagtagagatactatttgaaaatcattataacaaactaataaaaggtggtaaaaacgagaaaacatcaaaaagacaagttgagaagaaagcaatagaagatgctagatacgtatttccaaatgcgtgtgaaacaaagatggtatttactataaatgctagaagtttgtttaatttctttgaacatagatgttatgaaaatgggagttgtctagaaggaactatgacttgtggagatatagttcaagttagaaaaaaatttaagaacttgtaggaggtgaataatttggcgagtatagaaggaagaaatccggtaatagaagcaataaaaagtgacagagaaatagataaaatattaattgcaaattcagctaaagaaggttcaattaagaaaataataggaatggctaaagataagaatataattattcagtatgttgataaacataagctagatgaagtaagtacaagtcattcacatcaaggtgtaatagcttatgcaagtgagtataagtattatgaattagatgagctaatagatttagcaaagaataaagatgaagacccatttttcattatattagatgagataacagacccacataatttgggttcaataataaggacagcagatgcagtaggagcacatggagttatcattccaaaaagaaggtctgtacacataactcctgtagttgccaaagcatctgctggagcagtagaatatatgccagtttgcaaggtaaccaatatagttaatacaataaaaagactcaaagaagaagggctgtggattgctgcagctgatatggatggagaaactttttataaacaaaatcttactggtcctcttggtgtagtaattggaagtgaaggttttggaatatctagattggttaaacaaaactgtgactttatagtaaaaatgccaatgataggtaatgttacatctttaaatgcatctgtagcaggtggaatacttttatatgagatattcagacaaagactggataaaagtaaataggcatgaaaaaaaatataaatcattacttaataatagatggctacaatattataaatgcgtgggacaatttgaaagaactggctaaagaggacttagaagattctcgagaaaagcttattgatgacattatagaattttctgagtttatgggttataagactataatagtttttgatgcttataatgttaaaaattctcgagaaaaagttgaaaaaagaaaacacataacaatagtttatacaagagaacaccaaacagcagatagttatatagagaaatttataacttctttatcaaagtatgatgatgtaaaagtagccactaatgactatgcagaacagcaaatgattttaggaaaaggtgctactagaatgtctgcaagagaattaaagttagagttagatcgttccaagaataaaatgaaggaaaaaaatatcggtttgaggaaaaaaattcagcgaaattggttggaggaaaggttagataaagaaacattgtcgaaacttgagaacattcgtagaaagcgttgaaattactaggttctttagactataatatacctataaatttgttttatatatgggggagatttacatgttggtagcaaaagaaaaaagttatgagttagtggacaattgtcagcaggatgagtataacattgtattaagagcaagtgaaggggataaaatagcactagagtacattattactaaatacagaaattttgtaaaggcaaaagcaaagtcatattttttaattggagcagataaagaagatataatacaagaaggaatgataggcctttataaggcagttagagattttgatggaagtaagaccaattcatttaaatgttttgcggagatatgtataacaagacaaataataactgctataaaaactgcaacaagacaaaaacatatacctttaaattcatatgtttctttgaataaaccaatatatgatgaagagtcagacagaacacttttagatattatagctacaagtatagtaacagatccagaagagcttataattagtaaagaagagttaaaaaatatagaatcaaaaatgaacgaattgttaagtgacttggaattagaagtactagaattatatttaaatggaaagtcataccagtttatagcggacaagcttaaaagagatgtaaagtcaatagataacgctttacaaagggttaagagaaaattagaaaaacatcttgaaaacagaaatgattaatagtaaaatacttaccataagcttattgtgagcaaaattaatttatatcgaaagataagggaggaaattcaaaatggctaaagctaaatacgaaagaacaaaacctcatgttaatatagggacaataggacacgtagaccacggtaaaactacattaacagcagcaataacaaaaacattatatgacagatatcaattaggagaagcagtagatttcgcaaacatagataaagctccagaagaaagagaaagaggaatcacaatatcaacagcacacgttgagtatgaaacaccaaatagacactatgcacacgttgactgcccaggacatgctgactacgttaagaacatgataacaggagcagcacaaatggacggagcaatattagtttgttcagcaacagatggaccaatgccacaaacaagagagcatatactattatcaagacaagttggagtaccatatatagtagtattcttaaacaagtgtgacatggtagatgatgaagagttattagagttagtagagatggaagtaagagatttattaacagaatatgatttcccaggagatgacactccaatagtaagaggttcagcattaatggcattagaagatccaaagagcgagtggggagataagatagtagaattattcgagcaaatagatgagtatataccagctccagagagagatacagataagccattcttaatgccagtagaggatgtattctcaatcacaggaagaggaacagttgcaacaggaagagtggaaagaggagtactaaaagtacaagacgaagtagaattagtaggattaacagaagcaccaagaaaagtagtagtaacaggagtagagatgttcagaaaattattagaccaagcacaagcaggggataatataggagcattattaagaggagtacaaagaaacgagatagaaagaggacaagtactagcaaagactggatcagtaaaggcacacacaaagtttacagcagaagtatatgtacttaaaaaagaagagggtggaagacatacaccattctttgatggatatagaccacaattctatttcagaacaacagacgtaacaggagcttgtaagttaccagaaggaatagagatggtaatgcctggagataacgtaacaatggaagtagacttaataaactcaatagttgtagaagagggattaagattctcaataagagaaggtggaagaacagtagcttcaggagttgttgctacaataatagagtaattctttactaaactgatggattaaaaggaataacaaaaagaggggttaggctcctctttttttaacatagaaatacaaaaacattgacacagcataggattttgtgataacttatacaaggtaatgattataggaagttaataatatcttgaatactgtagatttttaataaatacatattttaaagatattatattcacatatattaacaatatatattattgtattacaaagttggaggtgtatcagatgagagttaaagtaactttagcatgtacagagtgtaagcaaagaaactacaacactactaagaataagaaaaataatccagacagaatagaattacaaaaatattgtagattctgtaaaaagcatacaactcataaagaaacaaaatagttttttataaggatgtgagtatggaatggctgcccaaaaaaatgacggtgcaaaaactaaaaaaaggtttagtttatttggatatttaaaagaaactaagcaagaattaaaaagagttacatggccgacaaaaaaggaactgtttaaaaacacaagtatagttttaactgtagttatttcatgcactatattagtatggggtatagacactatattatctggtgcactagcgttattactaaaatagacgaaaagaggtaagttaaatgtcagaattacaagaagcaagttggtatgtagttcatacctattcgggacatgaaaataaagttaaagctacaattgagaaagcagttaaaacaagaggtatggaagactgcataagacaagtagttgttccaacagaagaggtagtggaaactactaaaactggaaaagaaaaaactagacaacgtaaagtttatccaagttatgtcttggttaaaatgataataactgatgaatcttggtatgtagtaagaaatactaagggagttacaggtttcgttggacctggttcaaaaccagtaccattaagtgaagatgaagtcaaagctatggggatagatacaacagaccctaaagtagtaaatagcgatgttgattttgaaataggagacacagtaaaagtatctcaaggaccatttagtggacaaataggtaacatagaagaaattgacttagaaaatagagaagtcaaagtatgcataaatgcatttggtaaaaggactctatttgtaatagagcttgaaggtatagaaaaaatctaatactatatagaaaaatctgaggaggtgcgctcaaaatggctaaaaaagttataggtcaaataaaattacaaatacctgcaggaaaggctactccagcgccaccagttggaccagcattaggacaacatggtgttaatataatgggattcacaaaagaatttaatgctaaaactgcagatcaagctggaatgataataccagttgttataactgtatatcaagatagatcattcagttttataacaaaaactccaccagctgcagttttaattaaaaaagcattaaacttaaaatcaggttctggagaaccaaacaaaaagaaagttgctaaaatgacttcagctcaagtaagagaaatagctgagttaaaaatgcctgacttaaatgctgcatcagtagaagctgctatgagtatgatagctggtactgctagaagcatgggtgttgtaatcgaagactaattaaaagatacactttttttataaagtgggaggcgagaagccgaaattaaccacaaggaggaaaataaaatggctaaaaaaggtaaaagatatgcaggtgcattacaaaaagtagatagaactaaattttatgatgcatcagaagcattaacattagtttcagatatagctggagctaaatttgatgagacagtagaagcacacattaaattaggtgttgactcaagacatgctgaccaacaagtaagaggtgcagttgtattacctcatggaactggtaaaacaaaaagagttttagtttttgctaaaggtgaaaaagctaaagaagctgaacaagctggtgctgactttgtaggagctgaagaattagttcaaaaaatacaaggtgaaaactggtttgactttgatatagtagttgctactccagatatgatgggtgtagtaggtagattaggtagagtattaggacctaaaggtttaatgccaaaccctaaatcaggaacagttacatttgatgtagctaaagctatagatgaaataaaagctggtaaagttgaatacagattagacaaaactaacataatacacgttccagtaggaaaagtatcatttggtggagaaaaattaactgaaaactttactgcattaatggatgctataataaaagctaaaccagctgctgctaaaggacaatatttaagaagtataacagtagcttcttcaatgggacctggagttaaaataaacccagcaagaacagctgaataataaaactgttgacacaggttgacaaaaatgttattatatcacttgtcaatgtaaaaaagaatagatttgccgtagatagtgggtgcgaaagcttaatatcccgccgaggttttagataaattgagattactaaagcttttgatgtctacttttggcaacaaaagctttttataatgttgcggtaaatattaagcctatttggtgaaggaggtgcacatctatatgagaaaagctatagaaattaaatcagaagttgtttctgagatagttgaaaagttacaaaaatcttctgctgctgttgttgtagattacaaaggattaacagttgaagaagtaactgagttaagaaaacaaatgagagaagctggtgtagattacaaagtatacaaaaatactttagttagaagagcagctaaagaagttggtatagagcaatttaatgatgaattattagttggaactaatgccatagcatttggatatgatgatccagttgctccagctagaatattaaaaggattcatggattctcatccaaaaatgaaattaaagatgggtattgtggaaggtgcattctatgatgaatctaagattgttgaaatggctaacataccatcaagagaagttcttatcgctaaattacttggtagcttaaaagctccagtatcaaacttcgcatacttaatagatgcaatagcgaaaaaggcagaaggtcaagaagaagcttaattgcttaactaaaaaattataaatattaatttgaaataaaattcggaggtgctaaaaatgacaatagaacaaatattagaagctatagaaaatatgaaagttttagaattaaatgaattagttaaagctgctgaagaaaaattcggtgtatcagcttcagctccagtaatggtagctggtgcagctgctggtggaccagctgctgaagaaaaaactgagtttgatgtagtattaactgacgttggttcttcaaaagttggagttataaaagcagttagagaaataacaggattaggattaaaagaagctaaagaagtagttgacaatgctcctaagacagttaaagaaggagcttctaaagaagaagctgatcaaataaaagagaaattagaagctgctggagctaaagtagaagttaagtagtttctttaaaaagatacccattgggtatctttttttatttataaaaaactataaagaaagtatttggaattataaagaaagtgtttttataaaataaaaaaaatttatataatagtactaaattaagggtatcatatatggtgtaatggtattttaatttaacattattatcaaattaaaatataaacaattgttgtaatgtctgtatataaagtatataattaaactaaaatgtaaaattttacattttagtttaaaaaaatacacgagtgttttataaataaaatgtaataaataattaattaacaaatataaattttaaaataagttagatatttagaaaaatcgaaatttgtaggatttaaaggacatattcaaggaggagttaataatggaaaaattacaaggaaaaattgcagtagttactgcagcaacaaaaggtattggattagcatcagcagagatattagcaaaaaatggagcaactgtgtacttagcagctcgttcagaagaattagctaatgaagttataaataaaataagtgcagaaggtggttgtgctaagtttgtttactttaatgctcgtgaagaagagacctttacctcaatgatagaagaggtagttaaaaaagaaggtaagatagatatacttgtaaacaattttggttcaacaaacccttctcttgacaaagaccttgtaactggggatacagataatttctttgacacagtaaatactaatttaaaaagtgtgtatttaccatgtaaagcagcaattcctcatatgataaagaatggaaaaggaagtatagtaaatatatcaagtataggttcagtattacctgatttatctagaatagcttactgtgtatcaaaagcagcaatcaactcattaactcaaaacatagctacacaatatgctaaagacaatgttagatgtaatgctgtacttccagggcttattgcaactaaagcagcattagacaatatgtctccagagttcataaaagaatttttaaagcatgttcctttaaatcgtataggggaaccagatgatatagcaaaagctgttctattctatgctagtgatgactcatcatttataacaggggatttacttgaagttgcaggaggatttggtttacctactccacaatttgcagataatatattaggataattaaattactaatatgcaatgaaagcttatgcattagttatagtagaaatgatatttttataaaggccatagatataatttatattggaaaggtttgaggttcaaaattccaagttaaatttatttatggtctttattttgtatattttaataaattgtatatatttgtataaatgtaattatttacaatcattttaatatggaattataattaaataggggggatggtacttgtataaaattttttatagaaaattagacctataaatgaaaaatatggattttatattggaaaattgtacataatacataatatatgcttaaaataatttacaaaaaatcaaaaataatgcatagtttacatataagataaaaaatatattgaaaaatacttgacattatgctaaaattattagatgcgttagaatgaactattgttttatttttaattattgagaggtgaaaagtgaatgccacatcctgtcacgataggtaaaagaactagaatgagcttttctaaaattaaggaaatagctgatgtgccaaatcttatagaaattcaagtagattcctatgagtggtttttaaaagaaggtttaaaagaagtgtttgatgatatttcaccaatagaagattatactggtaatcttatattggaatttgtcgactattctctagatgataaaccaaagtacgatatagaagagtgtaaagagagagatgctacatattgtgcacctctaaaggttaaggtaagacttataaataaagaaacaggtgagataaaagaacaagaagtgtttatgggtgacttccctttaatgacagaaagaggaactttcgttataaatggagcagaaagagttatagtaagtcaattagttagatctcctggtgtttactatgcggaagaaagagataaaacaggtaagagattgatttcatctactgtaattcctaatagaggagcatggttagaatatgaaacagattctaatgatgtaatatctgtaagagttgatagaacaagaaaacaaccagttacagttttacttagagctttaggaataggaacagatgcagagataattgaccttttaggagaagatgagagattatctgctacattagaaaaagataatactaagacagtagaagaaggtcttgtagagatatacaaaaaattaagaccaggtgaacctcctactgtagaaagtgcatcatctttattaaatgctttattctttgacccaaaaagatatgacctagcaaaagttggtagatataaattcaataagaaacttgctttatgttatagaataatgaataaaatttcagcagaagacataataaatccagaaactggagaagtatttgtaaaagctggagaaaaaataagctatgatttggctaaagccatacaaaatgcaggtataaatgtagtaaatctactaatggatgatgataaaaaagttagagttataggaaataattttgtggatattaagtctcacattgattttgacatagatgatttaaacataaaagaaaaagtacattatccaactttaaaagaaattttagatggatatagtgatgaagaagaaataaaagaggctataaaatcaagaattaaagaacttataccaaaacatatattattagatgatataatagcttcaataagttatgagttcaatatattctataatataggaaatattgatgatatagatcacctaggaaacagaagaataagatctgtaggtgaattgttacaaaatcaagttagaattggtctttcaagaatggaaagagttataaaagaaagaatgacggttcaagatatggaagctataacgcctcaagcgttagttaacataagaccagtttcagctgcaataaaagaattttttggtagttctcagttatctcagttcatggatcaaacaaatcctctatctgagttaacgcataagagaagattatcagcccttgggcctggaggtctttcaagagaaagagctggattcgaagtgcgtgacgttcaccattcacactatggtagaatgtgtccaatagagactccagagggaccaaatatcggtcttataaactctctaggaacttatgcaaaaataaatgaatttggatttatagaatcaccatatagaaaatttgataaagaaacatcaacagttactgatgaaatacattatttaactgctgacgaagaagatttattcgtaagagctcaggcaaatgagccattaacagaagatggtaaattcgtaaaccatagagttgtttgtagaactgtaaatggtgctgttgaaatggttcctgaaagtagagtagattacatggatatatctcctaagcaggttgtatctgttgccactgctatgatacctttcttagaaaatgatgatgccaaccgtgcccttatgggagcgaacatgcagcgtcaggcagtgcctctagttagaagagaagcaccaattataggaactggtatagaatacagagcagcaaaagactctggagcagttgttgttgctagaaattctggtatagcagaaagagtaacagcagatgaaataattataaaaagagaagatggaaacagagatagatataatctacttaagtttaaacgttcaaactcaggtacttgtataaatcaaacacctataataaataagggtgaccagataataaaaggtgatgttatagcagatggtccagcaactgatttaggagaagttgcacttggaagaaactgtcttatagcattcatgacttgggaaggttataactacgaggatgctatattaataaatgaaagattagttaaagaagatagattatcaacaattcatatagaagaatatgaatgtgaagctagagatacaaaactagggccagaggaaataactagagatatacctaatgttggagatagtgcaatcaaaaacttagatgatagaggtataataagaataggtgcagaagtagactcaggtgatatattagttggtaaggtaactccaaaaggagaaactgaacttactgctgaggaaagattacttcgtgcgatattcggagaaaaagccagggaagttagagatacttcacttaaagtacctcatggtgaatctggtataatagttgatgtaaaagtatttactagagaaaatggagatgatttatctccaggagtaaatgaattagtaagatgttatatagctaaaaagagaaagataaaagttggagataagatggctggtcgtcatggtaataaaggggttatctcgagagtattacctgaagaagatatgccattcatggaaaatggaacgccattagatataatacttaacccacaaggtataccatcacgtatgaacatcggtcaggttctagaagttcatttaggacttgctgctaagacattaggatggtatgtagcaacatcagtattcgatggtgctaatgagtatgacataatggatgctcttgaagaagctggatatcctagagatggtaaattaactttatatgatggtagaacaggtcaatcttttgacaatagaataactgttggatatatgtattacttgaaactacatcacttagtagatgaaaaactacatgcaagaagtactggaccatactcattagttactcaacagccactaggtggtaaagcacaatttggtggacaaagatttggagagatggaggtttgggctctagaagcatatggagcggctcacatacttcaagagatacttactgttaagtctgatgatgttgtaggtcgtgttagaacttatgaagctatagttaaaggtgaaaacatacctgagccaggaatcccagaatcatttaaggttcttataaaggaacttcaaagtttatgcttagatgtaaaagtattgacagatgaagaccaagaaatagaagtaagagaatctgtagatgaagatgatacgataggtgaatttgagctagacgttgtaaatcacatgggagaagttgaagaaagtaatataatagaagaaattgaagatgattttgtggaagccacagaagatgaggatatagagaatttagaagaattcactgaagatgatttatttgaagaagaaatagattttgaaagtgatgactttgatatgtaaatttaattaatgtaaatctcaaatagaagggagagaactccttgtttgaattaaacaatttcgagtcgataaaaatagcattggcttctccagaaaaaataagacaatggtctagaggagaagttaaaaagccagaaactataaattaccgtactttaaagccagaaaaagatggtcttttctgtgaaaggatatttggaccacaaaaagactgggagtgtcattgtggtaaatatagaagagttagatataaaggtgtagtttgtgatagatgtggagtagaagtaactaaatcaaaagtaagaagagagagaatgggacatatagagctagctgctcctatgtctcacatctggtacttcaaaggtataccaagtagaatgggacttttacttgatatgtcaccaagatcgttagaaaaaatactatatttcgcctcatatgtagtagttgatccaggtgaaactggattgaatgaaaaacagttacttacagaaaaagaatacagaactgctcttgaaaagtatggatatacttttactgtgggtatgggtgctgaagctgtaaaaacattactacaaaatatagatttagaacaacaaagtaaagacttaagagcggaattaaaagatagtacaggacaaaagaaagtaagaacaattagaagattagaagttgtagaagcatttaaaaaatctggaaataaaccagaatggatgattttagatgcaataccagtaataccgccagatttaagaccaatggtacaacttgatggtggaagatttgcaacttcagacctaaatgatttatacagaagagttataaatagaaataatagacttaaaagactattagagcttggagctccagatataattgtaagaaatgaaaaaagaatgcttcaagaagctgttgatgcattgatagataatggtagaagaggtagacctgtaacaggacctggaaatagaccacttaaatctttatcagatatgttaaaaggtaagcaaggtcgtttccgtcaaaacttacttggtaagcgtgttgactactcaggacgttctgttatagttgttggaccagaacttaaattttatcaatgtggacttccaaagaagatggcattagaattattcaagccatttgttatggataaattagttaaagaaggttatgcacataatataaaaagtgcgaaatctatagtagaaaaagttaagccagaagtttgggatgttttagaagatgttataaaaagtcatccagttcttcttaaccgtgcaccgactctacatagattaggtatacaagcatttgaaccaatcttagttgaaggtaaggctataaaactacatcctcttgtatgtacagcttataatgcagactttgatggtgaccaaatggcagtccatgtacctttatcagtagaagcacaagcagaagcaagattcttaatgctttctgtaaataatatacttgctcctaaagatggttcacctataactactccatctcaggatatggttttaggttgctattatctaacaatagaagcccaagatggagctaaaggaacaggtatggtatttaaagactttaatgaactattacttgcttattacaataaatcagttcatctacatgcattagtgaaactgaaggtaacacttgaagatggaagaagttcattggttgaaagtactgttggtagatttatatttaatgaaaatatacctcaagacttaggttttgtagatagaaaagaaaatccatttgcacttgaagttgatttcttagcagataaaaaatctcttggtaaaataatagataaatgctttagaaaacacggaaatacagaaacagctgaattactagattatataaaagctctaggatttaaatattctacattaggtggtataacagttgctgttgatgatatgagtgtcccagaagaaaagaaagtatttatagctgaggcagaagctaaagttgataagtatgaaaaagcatacagaagaggtctaatctctgatgaagaaagatatgaaaaagttatagagacatggacagaaacaactgataaagttactgatgctcttatgggtggactagatagattaaataatatatatataatggcacattcaggagccagaggttctaaaaaccaaattagacagctggcaggtatgcgtggtcttatggcaaatgcatctggtaaaacagtcgagataccagttaaatctaatttccgtgaaggtttatcagtactagaatactttacatcttcacatggtgccagaaaaggtcttgccgatacagctatacgtacagctgaatctggatatttaacaagaagacttgttgatgtaagtcaagatgttattgtaagggaaatagattgtggaacagaagatactacagagatttatgctataaaagaaggaaatgaagttatagaagagatatatgatagaattgtaggaagatatactatagaccctatattaaatcctgaaactggagaagttctagttgaggctgattcaatgatacaagaagatgaagcagaaactatagtagctttagggattgaaaaaattaggataagaacagttcttaactgtaaaactaatcatggagtttgttctaagtgttatggtagaaacttggcaacaggaaaagaagttaatataggtgaagcagttggtataatagcagctcaatctatcggtgagccgggtactcagcttacaatgcgtacattccatactggaggagttgcaggagctgatataactcaaggtctaccaagggttgaagaattatttgaagctagaaaaccaaaaggattagctgtaataactgaagtatctggtagagttgaaattgatgaaacaggaaagagaaaagaagtaaatgtaataccagaagaaggcgagactcaaacatatgtaattccatatggttctagattaaaagttaagcaaggtcaaatgctagaggctggagaccctctaacacaaggatttataaatcctcatgatatagtaagagtaaatggtgttaagggagttcaagaatatatagttaaagaagttcaaagagtgtatagacttcaaggggttgatgttaatgataagcatatagaagttatagtaagacaaatgctatctaaagtaaaagttgaagacccaggagatacagatttattgccaggtggatatgaagatgtattaacattcaatgaatgtaataaagatgctatagataaaggtctaagaccagcagttgctaaaagagttttacttggtataactaaagcatctcttgcaactgattcattcttatcagcagcttctttccaagaaacaacaagagtattaacagaggcagcaataaaaggtaaagaagaccacttaataggacttaaagaaaatgttatattaggtaagttaataccagcaggaacaggaatgaagaaatatagaaatatagctgttgaaaaaattgaagattaatagcatatagagtaaagaaatcttgacaaccattatttgtggtgttaaaatagtaaagtgtgttgtttaaaagtacactaagggcttgaacaagttcttagtgacttttagatggcaataaatgagaactaaaaagcatcaagctagaaaagtgctaatatcacatatttatgtgttatagacattaaattgtaagtaacgaatgttacaatcagtcagtatgaatattcatattgatgtagttggcggtcactgataagatcgaaaatttggaaggaggtgcagatgatgccaacaattaaccaattagttcgtaaaagtagaaaagcgctagagaagaaatctactgctccagcattacaaaaaggttacaactctttaaataagaaagtaactgacgctagtgccccacaaaaaagaggggtttgtacttcagtaaaaacagttactcctaagaagcctaactcagctttaagaaaagttgccagagttagattaactaatggtatagaagtttctgcttatataccaggagaaggacacaacttacaagagcatagtgttgttcttataagaggaggaagagtaaaagaccttccaggggttagataccatatactaagaggtactctagatacagcaggtgttgataagagaagacaatcaagatctaaatacggtgcgaagagacctaaagaagctaaaaaataaaacaattaatgattgattatagttcggtgctttaaatatatatatatttacggcatcacggcattaaatgatttatgtcgagtacctatgatttaagttaaataattaaggagggaagcgaaatgccaagaaaaggtaatattccaaaaagagaagttttaccagatcctatgtatgggagtaaggtagttactaaattaataaataatctaatggtagacggaaaaaaaggaaagtctcaaagaatagtttatgatgctttcgcaattgttgctgaaaagacaggagaagaagctttagaagtatttaataaagcaatggataatataatgcctgttttagaagtaaaagcaagaagagttggtggggcaaattaccaagtgccaatcgaagttagacctgaaagaagacaaacattaggtttaagatggctagtaaaatatactagagctcgtggagaaaaaggaatggttgaaaagctagctaaagagataatggacgcagctaacaacactggagcttcagttaagaaaaaagaagatactcataaaatggcagaagctaataaagcatttgctcattacagatggtaggatatatagatatcttataaattcaaggatatcataaggaggataaccatggctagaaagtttcctttggaaaaaactaggaatataggaatcatggctcatatagatgcaggaaagactactactacagaaagaatcctgttttatactgggcaaactcataaaataggagaaactcatgaaggagcttctcaaatggactggatggagcaagaaaaggaaagaggtataacaataacttctgccgctactactgcttcatggaaagaccatagaataaacataatagatactcctggacacgtggacttcacagttgaggttgaaagatctctaagagttcttgatggttcagttgctgtattctgtgcaaaaggtggggttgagcctcaatctgaaaatgtatggagacaagctgaaacttatggagtacctagaatagcttttataaacaaaatggatatattaggtgcagatttctacaatgttataagcatgatgaaatctagattaaattctaatgcagttcctatgcaattaccaataggtaaagaagattcatttataggtataatagacttattaaaaatggatgctgttatatacaaagacgacctaggggttgaaatggaagaaacagatataccagaagatatgaaagaattagctgctgagtggagagaaaaattagttgaatcagtagctgaaactgatgaagaattaatgatgaaataccttgaaggtgaagaacttactatagatgaattaaaagttgctataagaaaagctactatagcttgtgaaatgaacccagttttctgtggtacagcttatagaaacaaaggtgttcagttagtaatagatgcagttttagattacttaccagcaccaactgatataccagctataaaaggtatattagcagatggagaagaagctgaaagacattcttctgatgaagagccattctctgcattagcattcaaaataatgactgacccattcgttggaaaactagcgttcttcagagtttattctggaacattagaatcaggttcttatgttttaaatgcaactaagaataagagagaaagaattggtcgtatattacaaatgcatgctaatacaagagaagaaataactaaagtgtatgctggagatatagcagcagcagtaggattaaaagatactactactggagacacattatgtgaccctgctaatccaataatacttgaatctatggaattccctgagccagttatatctgttgctatagaaccaagttctaaagcagctcaagaaaaaatgggtatagctcttcaaaaattagctgaagaagacccaactttcacagttaagactgaccaagaaacaggacaaactataatatctggtatgggtgaattacacttagagataatagtagatagattattaagagaatttaaagtagaagctaaagttggtgcaccacaagttgcatatagagagactataactcaaccagttgatgttgaatacaagtactctaagcaatcaggtggtagaggacaatacggtcacgttaagattagagttgctcctcaagagccaggtgaaggatacaagttcacaaacaaaactgttggtggatcagtaccaaaagaatatgttggtccagttgacatgggtatacaaggagctatgcaatctggtatagttgctggatatccagttgtagacgttgctgttgagttatatgatggttcttaccatgaggttgactcttctgagatggcgtttaagatggctggttcaatggcattcaaagatgctatgaagaaaggtaatgcagttcttttagagccttacttcaaagtagaagttgttactccagaagattacatgggagatgttatgggtgacttaaactcaagaagaggattaatccaaggtatggaagctagaagtggtgcacaagttataaatgcattcgttccactttcagaaatgtttggatactcaacagacctaagatcttcaactcaaggtcgtgcaacttacacaatgatattcgatcactatgagcaagttccagcttcagttgctaagaaaatagctgaaggaaaataatttaaaaataattaataatataaatataaaaaataatcagctagatgagatatatctcatctagcacaagataaagggaggaaattcaaaatggctaaagctaaatacgaaagaacaaaacctcatgttaatatagggacaataggacacgtagaccacggtaaaactacattaacagcagcaataacaaaaacattatatgacagatatcaattaggagaagcagtagatttcgcaaacatagataaagctccagaagaaagagaaagaggaatcacaatatcaacagcacacgttgagtatgaaacaccaaatagacactatgcacacgttgactgcccaggacatgctgactacgttaagaacatgataacaggagcagcacaaatggacggagcaatattagtttgttcagcaacagatggaccaatgccacaaacaagagagcatatactattatcaagacaagttggagtaccatatatagtagtattcttaaacaagtgtgacatggtagatgatgaagagttattagagttagtagagatggaagtaagagatttattaacagaatatgatttcccaggagatgacactccaatagtaagaggttcagcattaatggcattagaagatccaaagagcgagtggggagataagatagtagaattattcgagcaaatagatgagtatataccagctccagagagagatacagataagccattcttaatgccagtagaggatgtattctcaatcacaggaagaggaacagttgcaacaggaagagtggaaagaggagtactaaaagtacaagacgaagtagaattagtaggattaacagaagcaccaagaaaagtagtagtaacaggagtagagatgttcagaaaattattagaccaagcacaagcaggggataatataggagcattattaagaggagtacaaagaaacgagatagaaagaggacaagtactagcaaagactggatcagtaaaggcacacacaaagtttacagcagaagtatatgtacttaaaaaagaagagggtggaagacatacaccattctttgatggatatagaccacaattctatttcagaacaacagacgtaacaggagcttgtaagttaccagaaggaatagagatggtaatgcctggagataacgtaacaatggaagtagacttaataaactcaatagttgtagaagagggattaagattctcaataagagaaggtggaagaacagtagcttcaggagttgttgctacaataatagagtaattctttactaaactaatggatttaatataaaaaaaagaggggggtaactcctctcttttttgttttttgttgacaagtagcgctaaagcatatatactaaactagtgccttgagacagattaacaatcaagtttaaggttatgatgttgtaatagaaaataaaattgaaaaaaacagaaaaaaaacttgaaaaaatgtaacagatgatataaaatataatagtgtgcttgagagattaagaaaataataattaaatcctagtgaaatacgaactgatatcgatttaaaagttacaacacacccggagcagtgtatcggtattggttgtacgcaacttgaaaattaaacacgtgataaaggagggaaaacaaaatggctaagaatgaaaaaataagaataagattaaaatcatatgatcacaaattattagatttttcagcaggtaaaatagttgaaactgctaaaaaggctggatcacaagtttcaggacctgtgcctctaccaacagaaaaacaagttgtaactatattaagagctgtacataagtacaaagactctagagaacaatttgaaataagaactcataaaagactaatcgacatagctaatccaacacctaagacagttgactcattaatgagattagacttaccagcaggtgtagatatagaaataaaattataagaacccctaagatattatcctatagatgattatcttagaatgattactctaaaagatgtaatccgctgtaagaattataggaggtgctaatatgaaaggaatattaggcaaaaaagttggtatgactcaaatattcactgataaaggtgtagttatacctgtaacagctgttgaagcagggcctatggtcgttactcaaataaaaacagttgataaagatggatacaatgctatacaaataggttttgaagatgctaaagaaaaagctttaaacaaacctaaaaaaggacatttagctgctgctaatgttttaaagaaacatttaaaagaatttagagtagattctgtagaaggatacacagtaggacaagaaataaaagctgatgtatttgaagcaggtgcaaaaatagatgttactggaataagtaaaggtaagggattccaaggtccaataaaaagacatggacaaagtagaggtcctgaaactcatggttctagataccacagaagaccaggttcaatgggagcttgttcttacccaggtagagtatttaaaaacaaaaaattagctggacatatgggaagcgtaaaggtaacagttcaaaacttagaggttgttaaagtagatgctgacaagaaccttatattagttaaaggagctataccaggagctaaaggttcagtagtaactataaaagaagctataaaggtttctaaataatgactaacctagagaaaggaggaataacaatgccaaaattaaatgtactaaatgttagtggacaaaacgttggagaaatagaattatcagattctatatttggcgtagaagttaatggacatgttttatacgaagttgtaaaaaatcaattagcaaataagagacaaggaactcaatctgctaaaactagagcagaagttagaggtggcggaagaaaaccttggaaacaaaaaggaacaggtagagcaagacaaggttctacaagatctgtacaatgggtaggtggaggagttgcttttgcacctaaaccaagaagctacaaatatacattacctaagaaggtaagaagattagctatgaagagtgctttatcttcaaaagttcaaaatagtgaagttatagtattagatgcattaaacatggatgctcctaagactaaagaatttgctcaaatattaaacaatataaatgctgctaaaaaagctttagtagttatagctgacaaaaacgataacgtaataaaatcagctagaaatatagaaggtgttcaaactgcattagttaatactatgaatgtatatgatatattaaaatacgattcatttataataactacagatgctgttaaaaaagtggaggaggtgtacgcataatgactaatccacatgatgtaataataagaccagttgtaactgagcacagtatggctgaaatgggtgaaaaaaaatacacttttgttgtggctaaagatgcgaacaaaactgaaataaaaaaagcagtagaaaaagtattcggagttagtgttgataaagtaaatactttaaactacgatggaaaagttaaaagaatgggtagaactcaaggaagaacagcaagctttaagaaagcagtagttaaattaactgctgatagtaaagaaatagaattcttccaaggaatgtagtattataacaaacgaaggagggaaaacagatggctataaaaaagtttagaccaacttctcctgccttaagacaaatgacagttttagtttctgatgaaataacatgtaatcaaccagaaaaatctcttttagttaacttaaagaaaaatgctggtagaaacgtacatggtagaataactgttcgtcatagaggtggaggacaaaaaagaaaatatagaataatagattttaaaagagataaagatggtatacctgctaaggttgctactatagaatatgatccaaacagaactgcaaatatcgcattattaaactatgctgatggagaaaaaagatatatattagctccagttggaattaacgttggagatactatattatcaggattaggtgctgatataaaaccaggaaactgtttagcattaaaagatatgccagttggtactatcattcataatatagaattaaagccaggaaaaggagctcaattagttagatctgctggagtttctgcacaattaatggctaaagaaggaaaaaatgctttattaagattaccatcaggtgagatgagattagtaagcataaactgtaaagctactataggtcaagttggaaatatagagcatggtaacgtagttatcggtaaagcaggtagaaaaagacatatgggaataagacctactgtaagaggttctgtaatgaaccctaatgaccatccacacggtggaggggaaggtagatctccaataggtagaccatctcctgttactccatggggtaaaccagctcttggatacaaaactagaaagaaaaataaagcttcaaataaactaatagtatcaagaagaactaagtagtaaatttatttttgctcggaaaggaggaatataaatgtcaagatcaactaaaaaagggccttttgtccatgcaagacttttaaagaagatagaagctatgaatgctagtggaaataaagaagttataaaaacttggtcaagatcttcaactgtatttccacaaatggtagaaaacactatagctgttcatgatggaagaaaacatgttccagtatatataacagaagatatggttggacataaattaggtgagttcgttcctactagaactttcaaaggacataaggatgacgaaaaatctaataagagaaaataattaaattatgactaagaaaggaggaataacaatggaagcaaaagctactgctaaatacgtacgtgtatcaccaagaaaagcaggccaaatatgtgaccttgttagaggaaagaatgttgatgaagcattagcaatattaaagtttactccaagaggagcagcttcaataatagctaaggttgtaaaatcagctaaagctaacgcagaaaacaatcacgaaatggatactgaaaaattatatatagcatcaatagttgctaatcaaggaccaacaatgaagagattcatgcctagagctatgggtcgtgcaactacaataagaaaaagaacttctcatatagaggttgttgttaaagaaaaaaaataattaatagataggagggaaagtaatgggtcaaaaggttaatccacacggcttaagggtcggtgttataaaagattgggactcaagatggttcgctactgataaaaaagagttcggaaacttattattagaagaccataatatacgtaaattcttaaagaaaagattatactcagctggagttgctaagatagaaatagaaagatcagctaacaaaataaaaatggacttacacgttgctaagcctggtgtagttataggaagagctggtgcaggaatcgaagcattaaaagctgaattagaaaaaatgacaaagaaaactataatagttaatatagtagaagtaagaagtacagataaaaatgctcaattagtagctgaaaatatagctttagctatagagagaagggttgctttcagaagagcaatgaaacaagctatacaaagagcaatgaaatctggtgctaaagggataaaagtttctgcttcaggaagattaggtggagctgaaatggctagaactgaaggttatagtgaaggaaatgtgccactacaaactttaagagcagatatagattatggtttcgctgaagctgatacaacttatggaaaaatcggtataaaagtttggatatgtaatggtgaagttttaccaactagagacggtgtaaatccaagagaagaaagcagaaagagcgatagaagagacaacaagagagataatagaagaaacgatagaagaggaaatgacagaagaggaaatgataacagaggaaactacagaggacaaagacctcaaggtggatcaagacctcaaagaactgaaaacaaaggaaattaataatagttaggttcaaggaaggaggaaaaatactcatgttaatgccaaaaagagtaaagcgtcgtagagttcatagaggaagcatggctgggcaagctcataagggtaataaagttacttatggtgagtttggattagtagcattagaagcttcttggataacttctaatcaaatagaagctgccagaatcgcgatgactagatatataaaaagagggggaaaggtttggataaaaatattccctcataaaccagtaacaagaaaaccagcagagactcgtatgggtgcagggaaaggttctccagaatattgggtagctgtagttaagccaggaagagttatgtttgaattagcaggtgtttctgaagataaagcaagagaagctatgagacttgctgcacataaattaccaatcaaatgtaaatttgttaaaaaagaagatttagaagtaaagggtggtgaataggatgaaagctaaagaattaagagatttaacaagcgaagagctaatgaacaaattaaacgacttcaaaagtgaattatttagcttaagattccaattagctactggtcaattagaaaatacagctagaataaagtttgttaagaaggatatagcaaaagttaaaactgttcttgctgaaagaaagttatacgaaactagagcttaatttggaaaggaggctttttaaacatggaaagaggaagaagaaaagttagaataggccgtgttgttagtgataagatggataaaacaatagtagtagctgttgaagaattcgtacgtcatccactatataataaacgtgttaagagaactaagaaattcaaggctcatgatgaaaagaatatatgtaacatcggagatagagttaaaataatggaaactagaccattatctaaagataagagattcagactagttgaagttgttgagaaagttaagtagtttttgaagaaggagggattacgatatgatacaacaagaatcacgtctaagagttgctgataactcaggagctaaagaacttttatgtatacgtgttctaggcggaagtaaaagaagatatggtaacataggcgacgttatagttgctactgttaaaagtgcaacacctggtggagttgtaaaaaaaggtaaggttgttaaagctgttatagtaagaagcaaacaaggcgtaagacgtaatgacggaagctatatatcttttgatgaaaatgctgctgttataataaaggacgataaaactccagtaggaactcgtatattcgggcctgttgctagagagttaagagacaatgaattcatgaaaatagtttctcttgctccagaagtactataattaaggaggtgcaataggacatgatgcgtgttaaaaaaggtgacactgttgtagttatagcaggtaaagataaaggtaaaaaaggttcagttttaaaggtatatcctaaaactagcaaagtgttagttgaaggtgtaaatgtaataactaaacatcaaaaaccaagtgctatgaaccaacaaggtggaataataaataaagaagccccaatacacatatctaatgtaatgccatttgatcctgaaacaggaaaaggcgttagagtaagatatgaagtaaaagatgggaacaaagtaagagtatcagcaaagagcggaaaagaattataataaatattgcttgaaaggagggaccttaaatggcttctagattacaagaaaaatacatgaaagaagttgctcctgctttaatggagaaatttggatacaaaaacgtaatggagatacctaagttaaataaaatagttattaacatgggtataggtgacgctagagaaaatccaaaaggattagaaaaaggcgttgaagaattagaaatgatatcaggacaaaagcctgttataactaaagctagaaaatctgttgctaacttcaaattaagagaaggaatgccaataggaacaaaagttacattaagagctgacaaaatgttctactttatggacaaattagtttcagtttctttaccaagagttagagattttagaggagttaaccctaatgcttttgatggtagaggaaattatgctttaggagttaaagaacaattaatattccctgaaatagaatatgataaaatagataaagtaagaggaatggatataatatttgttactacagcaaaaactgacgaagaagctcgtgaattattaaaattattaggaatgccattttctaagtaagcaaaggagggattcccgtggctagaaaagcgatggttgttaagcaacaaagaaagcaaaagtacgctactagagaatacactagatgtactatatgcggaagaccgcattcagttttgaaaaaatttggtatatgccgtatatgctttagagaattagcttataaaggtcaaatacctggtgttagaaaagcaagctggtagaagcttgattagaatggaaggagggcaacaaaatgacaatgacagatccaattgcagatatgcttactcgtataagaaatgctaatgttgttaagcatgaaactgtagatgttccagcttctaatatgaagaaagaattagctagaatcttattagaagaaggtttcataagaggttatgatgttatagaagatggaaaacaaggtatcataagaatacaattaaagtacggacaagaaggcgaaagagttataacaggtcttaagaaaatatctaagcctggaatgagagtttacgctgctaaccatgagataccaaaagtattaaacggattaggaatatcagttatatctacttcaaaaggaatattaactgacaagcaagctagaaaagaaaatgttggtggagaagtaatctgctacgtttggtaattaatatgaacaatgtaaggaggtgcgaccatgtcaagaataggtgttaagccaataataataccagcaggtgttgaagttactatagctgaaggaaatttagttacagtaaaaggtccaaaaggaactttaactaaacaattaagtgctgagttaaacataaaaaaagaagaaaatacaataatggttgaaagaccaactgataataaaaaacatagatctttacacggactaactagaactttattagataatatggttgtaggtgtaaatactggtttcgaaaagaaattagaattaaaaggtgttggatatagagctcaaaaacaaggaaagaaattagttatgaacttaggtttctctcatccagttgagatggaagatccagaaggaataactgttgaagctccaaaccaaacagagttaatagtaaaaggtatagacaagcaattagtagggaattatgctgctaagataagagcttggagaaagccagagccatacaaaggtaaaggtataaaatacgttgatgaagtaatcagacgtaaagaaggaaaaactggtaaaaaataataccaaaacttaaacgctagaaaggagtgagctaggtgttaaaaaaggctgataaaaatgctaatagacttcaaagacataagagagttcgtagaaaaataagcggtacttctcaaagaccaagattatgtgtatttagaagtgctaacaatatatatgctcaaataatagatgacacaaaaagagtaactctagttgctgcatcttctttagaagcagaagttaagagtgctgtcaatcatacaggaaacaaggaagcagctaagaaagttggagaattagttgctaaaaaagctgttgaaaaaggaatcactgaagttgtatttgacagaggtggatacttatatcatggaagaattcaagaattagctgaaggtgctagagaagctggtcttaagttctaatacgaaggagggaaaaatacatgctacgtcgtaagccgatagatgcaggacaacttgacttacaagaaaaagttgttgaagtaagacgtgttactaaggttgtaaaaggtggtagaaatttcagatttgcagcattagtagttgttggagatgaaaacggacacgttggtataggtgctgggaaagcaatggaagtaccagacgctataaaaaaagcagttgaagatgctaagaaaaatctaatagtagtgccaatagttgggactacaattcctcacgaagtacgcggacactttggtgctggaaatatattaataatgcctgctgtagaaggtacaggagtaatagctgggggacctgctagagccgtacttgagctagctggactaaaagacgttagagctaaatctttagggtctaacaatccaagaaatatggtaaatgctacaatagaaggacttaattctctaaaaacagttgaagatatagctaaacttagaggtaaaaaagttgaagaacttctagggtaaggaggtagtgtaaaatggctaaattacaaataaagttagttagaagtgttataggaactactcctaaccaaaaaaagaatgttgaagcgttaggattaagaaaaagagaacaagttgttgtaaaagaagacaatgctcaaacaagaggtatgataaataaagtaagtcacttattagaagtaactgaaatagctgaataatttttataaagtagtgcaaggaggtgcaatccatgaagttacatgagttaaaacctgctgaaggtgcagtaagagctaagagaagattaggtagaggtactgcaactggacaaggtaaaactgcaggacgtggacaaaaaggtcaatggtctcgttctggtggtggagtaagagtaggatttgaaggtggacaaatgccactagctagaagacttcctaagagaggtttcaataacatatttaagaaagtttacacagaagttaatgttgaagttttaaacagatttgaaaatggaacagaaataactgcagaattattaaaatctactaaaactataagcaaaataggtaaagacggaattaaaatcttaggtgaaggtaatttagagaaagctttaactgttaaagctgctaaatttacagcttcagctcaagaaaaaatagaaaaagctggtggaaaagcagagttagtataataacctgctaatctcctagccagtacaggcggggtgaattagcgtgctgtcaaaattaaaacaagcttggaagattaaagcagtaagaaaaaaagtaatgtatacacttatgatgatcgtgatattcagaataggtactactataccagttccaggcatagacactagtattatacaaaagatggtaggcggcaatagtctactttctctgtataatatgtttactggtggagcatttagtaacttttcactatttgctttaggtataagtccatatatcactgcatcaatcataatacaacttctaacagtaggttttgaaagtttagcagaacttcaaaaatctggtgaagaaggaaagaaaaaaatcaataagtacactaaatatacagcactagctctagcagttgtacaagctttgggaattacattaggaattgtaagaagtgctttaatatcaaatagtgtgttttttatcacaactgttgtaataacattagtttcagcaagtatgttagtaatgtggattggggacaaaattactgaaaaaggaatcggtaatggtagttcagtaataatatttgcaggtataatatcaagaatacctacagatgttattaaaatatcgcaacaagttaaatctggcgaagttgcaccttgggttatagtgattctagctgtagttatattacttacagtaacaggagttacatttatacaagaagcaactagaaagatacctgtacaatatgctaaaagagttgttggaagaaaaatgtatggaggacaaagttctcatataccaatgaaagttaaccagtcaggagttatgcctataatttttgctagttcacttttagctttccctcaaacaatagctatgtttatgggtccaaatgctcaggcttttgttcaaaaatacttaagtatggcaacagaacaaggattttggacatatagatcaattgagattctacttataattttcttctcatatttttatacaactgtatcatttaatacagaagacatatctaaaaatatgaaaaataatggtggatttataccaggtataagaccaggtgagcctactatggattatttaaatagaattttaactagattaactttagctggagctactttcttagcaataattgctatggtgccagctcttacaacacattatatgaaagtaaatatgagtctagctgggacttcattgctaatcgttgttggagttgctttggagcttaagagacagttagagtcaaacttagttatgagaagctatcaaggtttcttaaaataaaatggagatggataatatgagaataatattacttggacctccaggtgctggtaaaggtactcaggcggcaggaatagtagaaaaatacaatatacctcatatatcaacaggagatatattcagaaagaatataaaagagggaacagaacttggaaaaaaagctaaagaatacatggaccaaggtttattagtaccagatgagttaactgtaggtttagttactgatagaatatctcaagaagattgtaaaaatggatttatgttagatggatttccaagaaatgtagcacaaggagaacatttagatatcttcttaaaaaatgctggtatatcactagataaagttgtcaatattgaagttgataagagtatattagtgtctagagcagttggtagaagaatatgtaagtcttgtggagctacttaccatgttgagtttaatcctcctaaagtagaaggtgtatgtgatgtatgccaaggagaattatatcaaagagctgatgataatgaagaaactgtatctaagagaatacaagtttatctagatgaaactaagcctttagtagattattatagcaaacaaggtataatagcagatataaaaggtgatcaagcaatagataaagtatttgaagatattgtcgcagccttaggaagtggaaaataaatgattatcttgaaatcaaaaaaagaaatagaacttttaagagaagcaggtaaaatagttgctgacactcatgaagttttaagaaaagctatttctccgggaatatctactttagaattagataaaatagctgaagagaatataagaaaatacaatgcagagccttcttttaaaggatatggaggttttccaggaagtatatgtgcttctatcaatagagaggtagtacatggtattccaggagaaactatattacaagaaggtgacattgtaagtttggatataggagcctattataaaggatatcatggtgattctgcgaaaactcacggagtaggcatgatatctgaagaagataggaaattgatagaagtaactagagaaagcttctatgaaggaataaaatttgctaaattaggatatagactttcagatatctcacacgcagtacaaacacacgttgagaaacatggtttctcggtagttagagatttagtgggtcatggagttggagcaaatcttcatgaagacccacaagtacctaattatggactcccaggaaaaggaccaagacttagagaaggaatggttattgctatagagccaatggttaatgcaggtcgttatcatgtaaagactctatcagatgggtggacgactgttacaatagatggaaaaaaatcagctcattatgagcatacgatagcaattactgaacatgaacctttgatattgacaaagttgtaatttaaaaagtaggtgaaaaaagtgctatcagataatttaagtataggtcaagttgttaaagtttcattaggacgagataaaggaaatttattctttgtagtcaaaataattaataatgaatatgtattaatagctgatggaaaaaagagaaaacttgacaaacctaagttaaagaaagtgaagcacttaaaaaaatatgattttattaatgatgaagttagaaaaagagtagtatctggacaagagattacagattcttttttaagagctgaacttactaagttaaattagataatttaacttattgaaatggagggctggttagttaatggccaaaaaagatgttatagaattagaaggtacagtttcagaagctttacctaatgctatgttcaaagttaaactagaaaatggacatgagatattatgccacatttctggaaagctaagaatgaacttcataagaattcttgaaggtgacaaggtgaatgttgaactttctccatatgaccttacaagaggaagaattacttggcgtaagaagtagactatattaatatttagtctaaggagggattaataatgaaggttagaccatcagtaaaaccaatatgtgaaaaatgtaaagtaataaaaagaaaaggaaaagtaatggttatctgtgaaaatccaaagcataagcaaaagcaaggataagaaattattactagcattttgttaaattttatagtataatactatattgtgatgttaacaaaagaacgttaaaatcgttgaacaatctggcgtaggattggcatatgatgtgaagttttaaacactaaaaactatgtgtaggaggtgcgatcatggcaagaatagctggggtagatttacctagagaaaaaagagcggagataggcttaacttatatatatggtataggtaaagcaactgctaacgaaatattagctaaggctgagataaatccagatactagaataaaagatttatcagaagatcaagttaatgagttaagaaaagttatagatgacgatttcttagttgaaggtgacttaagaagagaaattgctttaaacataaagagattaagagatataaaatgttatagaggaataagacacgctaaaggtcttccattaagaggacaaagaactaagactaatgctagaactagaaaaggtcctagaaaaacagtatctcgtaaaaagaaaaaataaataaataataactagatgaaggagggaaaaggaaaatggctaaaccaaaaaagaaagttacacgtattagaagaagagaacgtaaaaatatagaacgtggtcatgctcatatacaatcaactttcaataatacaataataactttaactgacgttcacggaaatgctatatcttgggcaagttctggacaattaggattcaaaggatcaagaaaatcaactccatttgcatctcaaatggctgctgaaacagctgcaaaagctgcgatggaacacggactaaaaagtgttgaggtattcgtaaaggggccaggttcaggaagagaagctgcaataagagctttacaagcaactggactagaagtaactatgataaaagacgttactccaatcccacataacggatgcagaccaccaaagagaagaagagtgtaattaataagagtacaataggaggtgtagataaatggcaagatatacaggtgcatcatgtagacaatgccgtagagagggaatgaaattattccttaaaggtgatagatgttatacagacaaatgtgctatagtaaaaagaaactatgctccaggtcaacatggccaaggaagaaagaaagtttctaactatggattacaattaagagaaaaacaaaaagttaaaagaatatatggagttttagagactcaatttagaaatttatatgaacgtgctgaaaatatgcctggtaaagcaggtgagaacttattaagtttattagagagaagattagataatgtagtttacagaatgggactagcatcttctagaaaagaagctagacaattagtgactcatggtcatttcactttaaatggaaataaagtagacataccttcattaatagttaaggttggagatgttatagaagttaaagagaaatcaagatcttctgcaaaattcaaaaatttagtagaagttaactcaagaatagctcctaagtggttagaagctaatgtagaaggaatgacagcaaaagtagttggtgttccaacaagagaagatatagatcttgagatagcagagcacttaatcatagaactttactctaaataataagcacacttttaaaaattattttaaaattttgtttaccctcagtggattactgaattttaaggagggttttgtccatgatagaaatagaaaagccaaaagtagatatagttgagcttagcgaagactatagatatggtaagtttgttatagagcctctagaaagaggatatggaataactataggtaacgcattaagaagaatattattatcatcattaccaggtgtagcagtgaatgctataaaaatcgatggagttcttcatgaattttcaacaatacctggtgttaaagaagatgttactgagataatattaactttaaaagagctttcagcaactatagatggtgaaggaagtagaacacttaaaatagaagctcaaggaccatgctctatcacaggtgcagatataatctgtcctccagatgttgaaatattaagtaaagatttagcaatagctacattagatgataatgctaaacttaatatggagatatttgtagataaaggtagaggttatgtttctgctgaagaaaataaaacagagaatgttccaataggtgttttacctgtggattcaatatatactcctgttgagaaggttagttatcatgtggaaaacacaagagttggtcaaaaaacagattatgataaattagtactagaagtttggactaatggtagtataaatcctcaagagggaatatcattagctgcaaaggtattagttgagcatttaaacttatttatagacttaactgaacatgtaagtagtgttgaaatcatggtagaaaaagaagaagatcaaaaagaaaaagttcttgaaatgactatagaagaattagatttatcagttagatcatataactgtttaaagagagcgggaattaatacagttgaagaattagctaataaatctgaggatgatatgatgaaggttagaaacctaggtaagaagtcattagaagaggtaatacaaaaactagaagaacttggattgggattaaaaccaagtgaagaatagcgagcaaaggagggataagaatggctaagtaccgtaaattaggacgtgaaacagctcacagaaaccttatgttaagaaacttagtaacttgcttactaagaagtggaagaatagaaactacagtgactagagcgaaagaaactcgtagaatggctgaaaagatgataactcttgctaagagaggagatcttcatgctagaagacaagttttagcttatgttatggatgaaacagtagttaataacttattcacagatttagctccaaaatatgctgagagaaatggtggatacactagaataataaaaatagggccaagaaaaggcgatgctgctgaaatggcttttatagaattagtatagtaaggaaaggattaggcttgatggcttaatcttttttttatttttttgactaaggtatgatataataatgtgtaaaatgatttttataagttattgcttactaaaaggagtatgagttaatggataatatagtaaaggtaaataatatttcgtttgagtatattacagatgaagcaaaacttaaagcaatagataatttaagcctagatgttaaaaaaggagaatttgttgcgataataggacataatggttctggtaagtctactttatctaaaaacttaaatgctattcttatgcctactgaaggaaatattcttattgatgatatggatactaaagaagaagaaagattatgggatataagacaaactgcaggcatggtatttcaaaatccagataatcaaatagttgctactatagtagaagaagacgttgcatttggacctgagaacttaggtatagaaccaaaagaaataagacgaattgtagaggagtctttaaaaagtgtaggtatgtatgatttaagagatagacagcctcatttgttatcaggaggtcaaaagcaaagagttgcaatagcaggaattattgctatgaggcctaaatgtataatatttgatgaagcaacagcaatgttagatccatctggaagaaaagaagttatgaaaacaataaaaagacttaataaggaagaaaatataactgttatacatataacgcactttatggaagaagcagtagaagctgatagagttgtagttatggaaaaaggaaagaaaatcttagagggaactcctagagaagtattcagtaaaataaagatgttaaaggaaatcggtttagatgtaccttgtatgacagagttatctagtttattaatagaagaaggtataaatattagtagtgatatattaactgtggatgagatggtgatggaattatgtcaattatagtaaagaatttaacacatatatataatgaagggatgccttttgcaagtaaggcacttgatgatatttcttttgagattaaagatagagattttgttggtcttataggtcatacaggctcaggaaaatctacattaatacaacatttaaatggattactaaagccttcctcaggagaaatatttataaatgattttaatataacagataaaaacttgaatttaactgagattagaaaaagagtaggggttgtatttcaatatccagaataccaattgtttgaagaaacgattgataaagatatagcttttggaccctctaatttaggcttagaggagtctgagatacataacagggtaaaagcatcaatggaagctgtaggacttgattatgagggatttaaagacaaatctccttttgaattatctgggggacaaaagcgtagagtagcaattgctggagttatagccatgaacccagaagttctcatattggatgaaccaactgctggtcttgaccctggtggaagagatgaaatttttaacttaataaaagacttacatgaaaaaaagaatatgactataatactatcatcacatagtatggatgatatggcaaagttagcaaaaactttaattgttatgaatcatggtagcgtagaatttatgggaactcctagagaagtgtttaaatcaaatgctagtaaattaaaagatataggattagatattccacaagttttagagcttgcattgaaattgagagaaaaaggctttgacatcagtgaggatatattgactttagaagaagcaaaacaggaaatattaaaagttgtgagaggacgaggattatgttaaaagatataactatagggcaatactacccaacaagttctgctattcataaattagatccaaggataaagcttgtagcgacaattgtatttatggtatctatatttgtagtaaataaattttggccttatatagtagttttattatgtttattagctatgataaaattggctaatataccagtcaaatatattgttaagggtgttaaacctcttaaatggattattttgtttacatttcttataaatatttttttcttaccaggtgatgaaatatggtcatttggatttttagctattacaaaacagggtctaagacaagcaatttttatggcaataagattaatatttttagtagttggtacatcattgcttactttaacaacttcaccaatagaattaactgatggaatagagagattgttgaatccatttaagaaaattggtttgccagttcatgaacttgcaatgatgatgacaattgctttacgttttattcctacattgttagatgagacagacaaaataatgaaggctcagatgtctagaggtgcagattttgaaagtaagaatcttataaatagagcaaagaatttagtaccacttttggtacctttatttgtaagtgcatttagaagagctgatgaattggctatggccatggaggccagatgttacagaggtggacataataggactaagatgagagagtctgttatatcaagaagggattatatggcatgtgtatttcaggttgtttatctgggagcaattatagctactagatttatagcaatttaattaataagttatagatataatgaggtaaagtatgagaaatataaaaattaaaatccaatacaatggtaagaattattgtggatggcaaaagcaacctgattctttagggatacaaggtacaattgaaagggctatatatgatataacaaaagaagaaaccagtcttatagggtctggtagaactgattcaggagttcatgctattggtcagattgcaaattttaaaattaattcaggtataagtatagaaagtataccaatggcactaaatgccaagttgccaaaagacatatcagttatagaagcatgtgaagtaaatgatgattttcactccagatacagtgcaaaaggtaaaacatataaatatttagtatataatagcaagtttagaaatccaatacttagtgagatatcatatcaagtaaaatatgaacttgattttgataaaatgtgttcagaagcaaaaagtttattaggaacacatgattttaaaggttttatgagttctggttcatctgtaaaagatacagttagaacgatatatgatattgatataagtaaaaaagatgacttgattacttttgagattagtggtaatggttttttatataacatggtgaggattattgttggaacacttgttgatatgggtcgtggcagaattaacgaaccatttttagatataatacaatcaaaaactaggtcaagatgtggacatacagctccagcacaaggattatttctcaaaaaagttcattattaacttgacacaccaggctacatgtattaaaatatatgagaatgtgttaataagtccacttgccccggacttgacataaacggtaaaaaaattttatgaaaagtagttaaggagggacagttatgaaaagttatatagctaagccagctgatgtacaaagaaaatggtacttagttgatgctgaaggaaaaacattaggtcgtttagcaacagaaattgcgacagtattgagaggtaaacataaaccaacatttactcctcacgttgatggtggagattttgttgttgtagtaaatgcagaaaaaatagttttaagtggtaagaaattagatcaaaaatattacagataccatactggttatgtaggtggattaaaagaaatatcttacagagatatgatggataagaaaccagaagaagttatatcacatgctgtaagcggtatgttacctaaaaataaattaagaagcagaatgatgactagattaagagtatttgcaggtgctgagcacactcatgcagctcaaaatccagaagttttaaactttaaataagattaataggtgaaaggaggagtttataatggctaacgttcaatattatggaactggaagaagaaaaagttctgttgctagagtaagactagttgcaggtgaaggaaatatattagtaaatggaagagcattagaaaattattttaattatgagacattaataagagatgttaaacaaccattagttttaactggtaatgaaaataaatatgatgttatagtaaaagttgaaggtggaggattcactggacaagctggagctataagacatggaatatctagagctttattaaaagctgatttagatttaagacctgctttaaagaaagaaggtttcttaactagagatgcaagaatgaaggaaagaaagaaatacggattaaaagcagcaagaagagctccacaattctcaaaaagataattacttatttttttggaaaagcaaaatcctttatttactgttattcagaaagtattggtattttaaaaatgttgggttaagttaattattgatatataataaaataataagatatcttattaggatgtttttcattaagaagaacatcctttttattttgactatttaataaaaaacatatgctaataacatttaaattttatttttataatattgtaatttaaaagtttatataaggttatatattttaagatattatttaacaatataaattctgaatatacgttatcaaagtttataatataaactaagtataatttattgtatagtattgaatgttagataaacatagtgaattaaataggggcagaaatataatatcattacataataatatattaataccaataaataaagatatatcaatattaaaaaaatttaaatgtttgtactaatatatggaatattatagtgtttttataagtatacatatacagggtgatgttgtgagaaagtacataaaacatataatttttagttttgcaatgatatgtctagtagtagtatccatatttgaaattaaaaatatttctgaagatgttatcaagtatatgccagtaacaaacaaaactataattttagatgctggtcatggaggcattgatccaggtgcattaaataaggataagagtacatctgaaaaggatattaacctagcaataacacttaagcttagagagcttatagaatcaagtggtggccttgtaatattaactcgagaagatgacagtagcctttataaagaagaaaataataaaactacaagacaaaaatataatgagaatttgaaaaatagaaaagaaataatatctaattctaatgccaatatgtttgtctctatacatcttaatgcatttgaacaatcaaaatactatggagctcaaactttttatcctaaagacaaacaagacagtaaagaattatcgaagtgtattcaagaagaacttaaaagagtagtagataagacaaacaacagagaagtcaaaccaagggatgatatatatcttttgaaagaaaataatattccatcagtactgatagaatgtggttttttatcaaatgaaaaagagtgtaaactcttaactgatgaaacatatcaagaaaaaatagcatgggcaatctacataggaatacaaaaatatttaagttgaaataagtataaaaataggtctaaatatgtaaatagcttgtattaaagcagttaaaatgcattaatataggctatttttattttgacaaaaaaatatttaaaataaaagttaaaaagttgttgacttagaataatatagatgatattatatatgagtgcccaaaaggagcaccaaaataagacaaaagaactttgaaaattaaacagtaggttaatttataaacaagaaacaaaccataaagccagatattttgataacaatagtatctgagcctgataaacttttatttgagagtttgatcctggctcaggatgaacgctggcggcgtgcctaacacatgcaagttgagcgatttacttcggtaaagagcggcggacgggtgagtaacgcgtgggtaacctaccctgtacacacggataacataccgaaaggtatgctaatacgggataatatatttgagaggcatctcttgaatatcaaaggtgagccagtacaggatggacccgcgtctgattagctagttggtaaggtaacggcttaccaaggcgacgatcagtagccgacctgagagggtgatcggccacattggaactgagacacggtccaaactcctacgggaggcagcagtggggaatattgcacaatgggcgaaagcctgatgcagcaacgccgcgtgagtgatgaaggccttcgggtcgtaaaactctgtcctcaaggaagataatgacggtacttgaggaggaagccccggctaactacgtgccagcagccgcggtaatacgtagggggctagcgttatccggatttactgggcgtaaagggtgcgtaggcggtctttcaagtcaggagtgaaaggctacggctcaaccgtagtaagctcttgaaactgggagacttgagtgcaggagaggagagtggaattcctagtgtagcggtgaaatgcgtagatattaggaggaacaccagttgcgaaggcggctctctggactgtaactgacgctgaggcacgaaagcgtggggagcaaacaggattagataccctggtagtccacgctgtaaacgatgagtactaggtgtcgggggttacccccttcggtgccgcagctaacgcattaagtactccgcctgggaagtacgctcgcaagagtgaaactcaaaggaattgacggggacccgcacaagtagcggagcatgtggtttaattcgaagcaacgcgaagaaccttacctaagcttgacatcccaatgacatctccttaatcggagagttcccttcggggacattggtgacaggtggtgcatggttgtcgtcagctcgtgtcgtgagatgttgggttaagtcccgcaacgagcgcaacccttgtctttagttgccatcattaagttgggcactctagagagactgccagggataacctggaggaaggtggggatgacgtcaaatcatcatgccccttatgcttagggctacacacgtgctacaatgggtagtacagagggttgccaagccgtaaggtggagctaatcccttaaagctactctcagttcggattgtaggctgaaactcgcctacatgaagctggagttactagtaatcgcagatcagaatgctgcggtgaatgcgttcccgggtcttgtacacaccgcccgtcacaccacgggagttggagacgcccgaagccgattatctaaccttttggaagaagtcgtcgaaggtggaatcaataactggggtgaagtcgtaacaaggtagccgtatcggaaggtgcggctggatcacctcctttctaaggagaattgcctactgtttaattttgaaagttctttacgaactttatatatgggggtgtagctcagttgggagagcacttgccttgcaagcaaggggtcaggagttcgactctcctcatctccaccatttaagagtatattacttaaatctttgatttacttagtagcctcttacaatgcacttatagcttaaatttatacaagctttgtgcgttagcactttaagcaacgggatttattcgttggcgacgtgctttagcactttgaaaactgcatatatatttagtgatatgacatctaatttgtaatatataaagctgataactttttaaaattatcgaagttgatagcttctaatctatcaaacctttttaactggtcaagttattaagggtgcagggcggatgccttggcactaggagccgatgaaggacgtgataagctgcgataagcttcggggagttgcacgtaaactttgatccgaagatttccgaatgaggaaactcacttagagtaatgtctaagtatcattaagtgaatacatagcttaatgaggggaactcagggaactgaaacatctaagtacctgaaggaagagaaagaaattcgattccgtaagtagcggcgagcgaacgcggattagcccaaaccaataaagttttctttattggggttgcggacatatcataacgaagaggtatcgtaattgaagaggtttggaaagacccaccacagaaggtaatagtcctgtatgttaaacgagaagacttcagatatgatccagagtaccacgggacacgtgaaaccctgtgggaagcaggagggaccaccctccaaggctaaatactacctagtgaccgatagcgtatagtaccgtgagggaaaggtgaaaagaaccccgggaggggagtgaaatagaacctgaaaccctgcacttacaagctgtggaagcacatttcttgtgtgaccgcgtactttttgtagaacgggccaacgagttacgttaagtagcaaggttaagcacttaaggtgcggagccgtagcgaaagcgagttttaactgagcgttcagttacttgacgtagacccgaaaccgggcgacctacccatgagcaggatgaagcgaaagtaaaatttcgtggaggtccgaacccacgagcgttgaaaagctcggggatgacttgtgggtagcggtgaaattccaatcgagcccggagatagctggttctccccgaaatagctttagggctagcctcaaggtgagagatacggaggtagagcactgaatgtcctagggggtattgcacctaccgaagactatcaaactccgaatgccgtcatcttatacttgggagtcagactgtgggtgataagattcatagtcgaaagggcaacagcccagatcgtcagctaaggtccctaaatgtaagttaagtggtaaaggatgtgggattgcacagacaaccaggatgttggcttagaagcagccactcattcaaagagtgcgtaatagctcactggtcgagtgatcctgcgccgaagatttccggggctaaaacttactaccgaagctacggcatcagtaatgatgggtaggggagcttcccatacgggttgaagcatgaccgtaaggacatgtggacagtatgggagtgagaatgttggcatgagtagcgagatgtgggtgagaatcccacaggccgtaaacccaaggtttccaggggaaggttcgtccgccctgggttagtcgggacctaagctgaggccgaaaggcgtaggtgatggacaacaggttgatattcctgtactaccgataaccgtttgagagaagggatgacacagtaggataagctaagcacactgttggttatgtgtgcccaagcattgaggcagtcaaagtaggcaaatccgctttgataatgctgggatgtgatggggagcgaaatttagtagcgaagtagctgatttcacactgtcaagaaaagtctctatcgaggttaaaggtacccgtaccgcaaaccgacacaggtgggtgaggagagtatcctaaggccagcgagagaactgttgttaaggaactcggcaaaatgaccccgtaacttagggataaggggtgccaccatcaggtggccgcagagaataggcccaagcgactgtttaccaaaaacataggtttctgctaagtcgcaagacgatgtataggagctgacgcctgcccggtgctggaaggttaaggggatctgttagagcaatcgaagcagtgaacttaagccccagtaaacggcggccgtaactataacggtcctaaggtagcgaaattccttgtcgggtaagttccgacccgcacgaaaggcgtaacgatttgggcactgtctcaacaacagactcggtgaaattgtaattccggtgaagatgccggatacctgcgacaggacggaaagaccccatggagctttactgtagcttgacattgggtcttggtactacatgtacaggataggtgggaggctttgaaaccaggacgccagttttggcggagccatccttgggataccacccttgtagtactgggactctaaccataggccatgaatctggtcttgggacactgtcaggtgggcagtttgactggggcggtcgcctcccaaaaggtaacggaggcgctcaaaggttctctcagtacggtcggaaatcgtacgtagagtgtaaaggcaaaagagagcttgattgcaagacatacaggtcgagcaaggatgaaaatcggacttagtgatccggtggttctgcgtggaagggccatcgctcaacggataaaagctaccctggggataacaggcttatctcccccaagagtccacatcgacggggaggtttggcacctcgatgtcggctcatcacatcctggggctgtagtaggtcccaagggttgggctgttcgcccattaaagtggtacgcgagctgggttcagaacgtcgtgagacagttcggtccctatccgtcgcaggcgtaggaaatttgagaagacctgtccttagtacgagaggaccgggatggacgtacctctggtgtaccagttgtcctgccaagggcatggctgggtagctatgtacggaatggataagcgctgaaagcatctaagcgcgaagccaacttcaagataagatttcccaccgcaagggtaagaccccagaaagactatctggttgataggtcgaaggtgtaagtgcagtaatgtatttagcttatcgatactaataggtcgaggacttgaccaatattatttgatgttattcattaagatatatgtgcagtttttagagtgttaactctaaaaaaaaataaaaaaagtattgacaaaaatagtaaaaaatgttaatattatacttgtcctagcaacaagaaaaaaatgtggttataatagcagagaagatacacctgtttccattccgaacacagaagttaagttctctagcgctgatggtacttggtgggaaactgcctgggagagtagggcatagccacgtgaatgttccaaggtagctcaacggtggagcaaccggctgttaaccggtaggctgtgggttcgagccccacccttggagccattatggctcgttggtcaagaggttaagacaccgccctttcacggcggtaacaggggttcaattcccctacgagtcaccatttgtgggatcatagctcagctgggagagcacctgccttacaagcagggggtcacaggttcgagccctgttggtcccaccatttgcggcctggtagttcagttggttagaatgccagcctgtcacgctggaggtcgagggttcgagccccttccaggtcgccaaaataaaaatgctggtgtggctcaacggtagagcagctgacttgtaatcagcaggttgtaggttcgattcctatcaccagctccatgtaaaactaatacggaggatttcccgagcggccaaagggggcagactgtaaatctgttgtcatcgacttcggtggttcgaatccaccatcctccaccaattaaatatgcgggtgtagctcaatggtagagttctggccttccaagccagctgtgagggttcgatccccttcacccgctccaaagaaagcgtgggtgcatagctcagctggatagagcaacgcccttctaaggcgtgtgtccggggttcgaatccctgtgcgctcaccacatatatattggggattagccaagtcggtaaggcacatgactttgactcatgtatgcgtaggttcgagtcctgcatccccagccaaataaaaatatggtctattagctcagtcggtagagcacctgacttttaatcagggtgtcccgcgttcgagtcgcggatagatcaccaatggagaggtgtccgagtggtttaaggagctggtcttgaaaaccagtgacttcgaaaggggccgtgggttcgaatcccaccctctccgccaaaaaaatgactgaatttggagaagtactcaagtggctcaagaggatcccctgctaagggattaggctgggtaaccggtgcgagggttcgaatccctccttctccgccattcaaaaacgaggtgtagcgcagtttggtagcgcacatggtttgggaccatggggccgggggttcgagtcccttcacctcgaccaacttaagcttttagttcagttggttagagtgcccaactcatggctagtaattctagggtttgagtccatgaaggttattcttcataggggtgtagctcagttggtagagcgtcggtctccaaaaccgtgcgccgggggttcgagtccctccacccctgccaaataaaaaggacttgaaaaaagttggattttagagtagtataagatagtaaataagatttcgaggtgtagcgcagtttggtagcgcacatggtttgggaccatggggccgggggttcgagtcccttcacctcgaccaagaaaagggcctatagctcaggtggttagagcgcacgcctgataagcgtgaggtcgctggttcgagtccagctaggcccaccatttgcccagatagctcagtcggtagagcaggggactgaaaatccccgtgtcggtggttcgattccgcctctgggcaccaggaatacggcggtatagcttagttggctagagcgttcggttcatacccgaaaggtcataggttcgactcctattaccgctaccatctaactatatcaataaagaactttgaaaattaaacagtaggttaatttataaaacaagaaacaaaccataaagccagatattttgataacaatagtatctgagcctgataaacttttatttgagagtttgatcctggctcaggatgaacgctggcggcgtgcctaacacatgcaagttgagcgatttacttcggtaaagagcggcggacgggtgagtaacgcgtgggtaacctaccctgtacacacggataacataccgaaaggtatgctaatacgggataatatatttgagaggcatctcttgaatatcaaaggtgagccagtacaggatggacccgcgtctgattagctagttggtaaggtaacggcttaccaaggcgacgatcagtagccgacctgagagggtgatcggccacattggaactgagacacggtccaaactcctacgggaggcagcagtggggaatattgcacaatgggcgaaagcctgatgcagcaacgccgcgtgagtgatgaaggccttcgggtcgtaaaactctgtcctcaaggaagataatgacggtacttgaggaggaagccccggctaactacgtgccagcagccgcggtaatacgtagggggctagcgttatccggatttactgggcgtaaagggtgcgtaggcggtctttcaagtcaggagtgaaaggctacggctcaaccgtagtaagctcttgaaactgggagacttgagtgcaggagaggagagtggaattcctagtgtagcggtgaaatgcgtagatattaggaggaacaccagttgcgaaggcggctctctggactgtaactgacgctgaggcacgaaagcgtggggagcaaacaggattagataccctggtagtccacgctgtaaacgatgagtactaggtgtcgggggttacccccttcggtgccgcagctaacgcattaagtactccgcctgggaagtacgctcgcaagagtgaaactcaaaggaattgacggggacccgcacaagtagcggagcatgtggtttaattcgaagcaacgcgaagaaccttacctaagcttgacatcccaatgacatctccttaatcggagagttcccttcggggacattggtgacaggtggtgcatggttgtcgtcagctcgtgtcgtgagatgttgggttaagtcccgcaacgagcgcaacccttgtctttagttgccatcattaagttgggcactctagagagactgccagggataacctggaggaaggtggggatgacgtcaaatcatcatgccccttatgcttagggctacacacgtgctacaatgggtagtacagagggttgccaagccgtaaggtggagctaatcccttaaagctactctcagttcggattgtaggctgaaactcgcctacatgaagctggagttactagtaatcgcagatcagaatgctgcggtgaatgcgttcccgggtcttgtacacaccgcccgtcacaccacgggagttggagacgcccgaagccgattatctaaccttttggaagaagtcgtcgaaggtggaatcaataactggggtgaagtcgtaacaaggtagccgtatcggaaggtgcggctggatcacctcctttctaaggagaattacctactgtttaattttgagggttcgtttttacgaatactcaaaattagcacttttagcaacagaataaactgaacgcatgtgaagtttgtttgttggcgctgtgcgttagcactttaagcaacggaatttattcgttggcgccgtgctttagcactttgaaaactgcatatatatttagtgatatgacatctaatttgtaatatataaagctgataactttttaaaattatcgaagttgatagcttctaatctatcaaacctttttaactggtcaagttattaagggtgcagggcggatgccttggcactaggagccgatgaaggacgtgataagctgcgataagcttcggggagttgcacgtaaactttgatccgaagatttccgaatgaggaaactcacttagagtaatgtctaagtatcattaagtgaatacatagcttaatgaggggaactcagggaactgaaacatctaagtacctgaaggaagagaaagaaattcgattccgtaagtagcggcgagcgaacgcggattagcccaaaccaataaagttttctttattggggttgcggacatatcataacgaagaggtatcgtaattgaagaggtttggaaagacccaccacagaaggtaatagtcctgtatgttaaacgagaagacttcagatatgatccagagtaccacgggacacgtgaaaccctgtgggaagcaggagggaccaccctccaaggctaaatactacctagtgaccgatagcgtatagtaccgtgagggaaaggtgaaaagaaccccgggaggggagtgaaatagaacctgaaaccctgcacttacaagctgtggaagcacatttcttgtgtgaccgcgtactttttgtagaacgggccaacgagttacgttaagtagcaaggttaagcacttaaggtgcggagccgtagcgaaagcgagttttaactgagcgttcagttacttgacgtagacccgaaaccgggcgacctacccatgagcaggatgaagcgaaagtaaaatttcgtggaggtccgaacccacgagcgttgaaaagctcggggatgacttgtgggtagcggtgaaattccaatcgagcccggagatagctggttctccccgaaatagctttagggctagcctcaaggtgagagatacggaggtagagcactgaatgtcctagggggtattgcacctaccgaagactatcaaactccgaatgccgtcatcttatacttgggagtcagactgtgggtgataagattcatagtcgaaagggcaacagcccagatcgtcagctaaggtccctaaatgtaagttaagtggtaaaggatgtgggattgcacagacaaccaggatgttggcttagaagcagccactcattcaaagagtgcgtaatagctcactggtcgagtgatcctgcgccgaagatttccggggctaaaacttactaccgaagctacggcatcagtaatgatgggtaggggagcttcccatacgggttgaagcatgaccgtaaggacatgtggacagtatgggagtgagaatgttggcatgagtagcgagatgtgggtgagaatcccacaggccgtaaacccaaggtttccaggggaaggttcgtccgccctgggttagtcgggacctaagctgaggccgaaaggcgtaggtgatggacaacaggttgatattcctgtactaccgataaccgtttgagagaagggatgacacagtaggataagctaagcacactgttggttatgtgtgcccaagcattgaggcagtcaaagtaggcaaatccgctttgataatgctgggatgtgatggggagcgaaatttagtagcgaagtagctgatttcacactgtcaagaaaagtctctatcgaggttaaaggtacccgtaccgcaaaccgacacaggtgggtgaggagagtatcctaaggccagcgagagaactgttgttaaggaactcggcaaaatgaccccgtaacttagggataaggggtgccaccatcaggtggccgcagagaataggcccaagcgactgtttaccaaaaacataggtttctgctaagtcgcaagacgatgtataggagctgacgcctgcccggtgctggaaggttaaggggatctgttagagcaatcgaagcagtgaacttaagccccagtaaacggcggccgtaactataacggtcctaaggtagcgaaattccttgtcgggtaagttccgacccgcacgaaaggcgtaacgatttgggcactgtctcaacaacagactcggtgaaattgtaattccggtgaagatgccggatacctgcgacaggacggaaagaccccatggagctttactgtagcttgacattgggtcttggtactacatgtacaggataggtgggaggctttgaaaccaggacgccagttttggcggagccatccttgggataccacccttgtagtactgggactctaaccataggccatgaatctggtcttgggacactgtcaggtgggcagtttgactggggcggtcgcctcccaaaaggtaacggaggcgctcaaaggttctctcagtacggtcggaaatcgtacgtagagtgtaaaggcaaaagagagcttgattgcaagacatacaggtcgagcaaggatgaaaatcggacttagtgatccggtggttctgcgtggaagggccatcgctcaacggataaaagctaccctggggataacaggcttatctcccccaagagtccacatcgacggggaggtttggcacctcgatgtcggctcatcacatcctggggctgtagtaggtcccaagggttgggctgttcgcccattaaagtggtacgcgagctgggttcagaacgtcgtgagacagttcggtccctatccgtcgcaggcgtaggaaatttgagaagacctgtccttagtacgagaggaccgggatggacgtacctctggtgtaccagttgtcctgccaagggcatggctgggtagctatgtacggaatggataagcgctgaaagcatctaagcgcgaagccaacttcaagataagatttcccaccgcaagggtaagactccagaaagactatctggttgataggtcgaaggtgtaagtgcagcaatgtatttagcttatcgatactaataggtcgaggacttgaccaatatttatttgatgttcattcattaagatatatgtgtagtttttagagtgctaactctaaagaaactagtattactaggttctataaacttattaaaaacttaatagaaatattaagcataaagattatgtggttacaatagcagagaggatacacctgttcccattccgaacacagaagttaagctctctagcgctgatggtacttggtgggaaactgcctgggagagtaggacgtagccacgtaatttttttgttataataaatttagaatttaacttatatagtttaatttgataatttgatgaaaaaaataaaagacttactgatttttaaatctataggtcttttattttttatctaacatttaaattaagttgttgaatatatcttatattacttactttatatattaattaccattaatacattatatctaattactattcatctaaattattatgccattattttatatacaaattcttttaatttgtctaatccagataaaaaagtattttcactgcaagcataggatatacgaatatatttatccataccaaatgctatgccaggaacaactgcaacattatattcttctaaaaattgattacaaaattctatagaaaaactatctttatattcaaatttctcagatactttagaaagatctataaatatatagaatgcgccatttggattcacatatcctacattatcaatagagtctagttttgatttaattaaatctcttcttgatttatatgttttaaccatattgtctatgtcaattgagcaatctttcaaggctccataggctatgtattgtgctgttagacttgggtgagatataagatgtccttgtatagaactcattgctttagcaatcgttttattagatgcagtatatcctaatcttaatccagtcattgcagctgacttagaaaaaccatttatagttattgttatatctttagcttcttcgcttaatgatgcaattgatgtaaattcaccagtgtagcatattttttcatatatttcatctgctaaaatatatattttattttgtatgcatacatctactatttctattaattcatcttttgtataaacactaccagtaggatttgaaggattgtttattacaagaatttttgttttatctgttatagatttttcaagttcttcttttgttaacttaaatccattttcttttttagtatcaataaaaactggaacagcattaactaacttaatcatttcaggataactaacccaataaggctttggtaataagacttcatctccttcgtctgttaaagctagtaaagtatttgttattgagttttttgctccacttgatacaactatttcgtctattgaatagttacagttattttcttcaataagttttttacagatttcctctctaagtatttttaatcctggaactaaatcatatttagtgtaatctttatttaaagaatcaataccataagattttgcgttattaggtacattaaaatcgggttctcctatactaagatttattactttaactccattactttccatttctttaactttagaactaatacctattgtgtaggatggtgttataaagtttagtctttttgataacataaaatgcctccttttaaattattatttatattatacgacaaatttaaagaatttacataaggaaatttgtagatatatacattaatatatataatagcctacactttttgcctaaaattagtgtaaaaaaaagagaaaaaaattttaactttcaaagttgttagaaacgctactgttcaaaatatccacatagtatttgcaatgatttgcgcaagtttgactattatgtacaaatttggtaatcttaatatagcaattattaagataatccctttaacttagttgaaggggatttttttagacttaacatactacatatagtggtattgggattaataaaatacaatatatagtaacaggaggtttttttaattggttgaattcgtaaaaaaaagagatggaagagtaattccatttaatgaagatagaataacaagagctatatttttagcagcaacgaatgttgcagaaagagaaggaatagtacctgattataaattatctgagcaattaactcaagaagtaataaagtttttaaatcataaatactcagaatcagttccaagtgttgaagatatacaagattctgtagttaaggttcttatagaaactggccatgcaaaaactagtgaagaatatataatatacagaactgaaagaagtagaataagaaattcaaaaacaagattgatgaaggcaatagaggaaattacctttgaagatgcagaagatgctgatataaaaagagaaaatgcaaatattaatggtaatacagcaatgggaactatgttacaatatggaagcactgtatctaaagaattttgtaaaacacatatattaaaaccagaacattcttttgctcatgataatggagatatacacatacatgatatggattttttaaatatgggaacattaacttgttgtcaaatagatgttaaaaaactattcaatggtggattttcaacaggacatggctttttaagagagccacaagatataataagttatggtgcattagctgcaattgctatacaaagcaatcaaaacgatcaacatggaggtcaaagtataccatttttcgattatggattggctgaaggtgtatataagacatttaagaaattctacataggaaatttagctaaagcattgaagttatttaaaggaattgaaaataatgatgtgataaagaacatagtatataatacagagaaagaaacaaatcaaaaagttggtcttaagagagatgaattgtatctaaacttagaaaaagagaaattaatacagacttttgatatagatgatgaacttgtaaataagatgcaaaactttgcatttgaagaatcgtatagagaaactgataaaaaaacatatcaatctatggaagcatttatacacaatctaaatacaatgcactctagagcaggtgcacaggtaccattttcaagtgtaaacttcggaacagatacttctgaagaaggaagaatggtaactaagaatcttctattatctcaagaaagaggtttaggtaatggagagacaccaatttttccaattttaatatttaaggtcaaagaaggcataaatttaaatcctgaagaccctaattatgatttatttaaattatcatgcagagtatcagctaaaagactatttcctaattttagttttttagatgcgccttttaatgcaaaatattataaaaaaggtgaaccagatacagaggctacatatatgggttgtagaacaagagtacttagtaatgtgtgtggttcagaaacagttagtggtagaggaaacatatcttttactacagtaaatttaccaagattgggtataaaacatggtattataaataatgaaaaggctaatttagatggtttctttgaagaattagatgagaagataaacttaattatagaacaattattggagcgctttgaggttcaaggaaataaaaagatgaagaattttccattcttaatggggcaaggtgtatggaaaggttctgatgatttagtaccagaagatacactaaaagaagtaataaaacaaggaacattgacaattggatttataggtttagcagagtgccttattgctcttataggtaaacatcatggagaaagtaaagaagctcaagaattaggattaaaaatagtgtcacatatgagacataaaatggatgaagcaacggacaaatataaattaaatttctccttaatgggtactccagcagaaggtctttcaggtaggtttactaaaatagataaaaaagtttatggagaaattaaaggtatcacagataaagaatattatactaattcattccatgtaccagtttattacaatataagtgcatatgataaaattgagatagaagctccataccatgaattgactaatgcaggtcatataacatatgtagagttagatggagatccatctgataatttagaggcttttgaaactgttataaaagctatgaaagatttgggtataggatatggaagtataaatcatcctgtagatagagacccaatatgcggtttttcaggtgtaataacaagtaatatatgccctgtatgtggaagaaatgaagatgaaagtgacatcaaattcgaaagaataagaagaataacaggatacttagttggtacagttgatagatttaataatgctaaaaaagcagaagtaagagatagagtaaaacatagatagttttatttgggggaataagttatgaaaataagaatgtcatctactataagttatgacagcatagttgatggaccaggattaagaatggtaatatggactcaaggatgtattcataattgtaaagagtgccataatcctcagacacatgatttatgtggaggattttatatggatacagaagaaattataaataaagtcaaatcattgaaattacaaaaaggcattacgctatcaggaggagaaccatttttacaaccagaaccattagaagaaatagcaagagaagctaaaataaatgggttagatgtatggtcatatactggatttacgtttgaacaactgttagataaaaaaaatagagcgtattttaaaaatttaaatttactaaagcaaattgatattttagtggatggaaaatttatagctgaaaaaaaagatataagcttaaagtttagagggtcatcaaatcaaaggataattgatgttcaaaaaagtttgaaatataaaaaagtgtttttggttgagcaatatatgaaggatgatttatctatagcagaataaaatataaataaacaggattaaatatatgcatatatttaatcctgtttattttcatataatatttcaagtttgtataatgtaacaattaaaccaaaagactcattgtatatttgaaattaagttttttatagtttataggtgttttatgtggattacgaatgatatagtatcgatacattatttaatcgattcttattccaagaaacaattaatttatagaaattcttaattgttacaatataaatatctagataagttataagatactgataaataatttataaagtttattaatctaatattgtgtgtgaatgttaagtggtcaagtagtctaaaaaatgaaaaagatttaaaaaagtgttttaactaaacacataagtgttaaattcatgtataagtataggttagatacataagaaataattatgtaatatctatctttgtaaaaaaatattaaattttgtaatttgtggataaatatgtttataatgtggataatatttaatgtaataagttaaagcaatatgaatcaactgtttataatgtggataatattataaatgtatgaataattgcagtatttaaaaacaaaaaaagttaaaaaagttgttgactctaaaagaaaaagttggtatagtaatacttgtcctcaagaaaagggcaaacaaataaagcataaagaactttgaaaattaaacagtaggttaatttataaaacaagaaacaaaccataaagccagatattttgataacaatagtatctgagcctgataaacttttatttgagagtttgatcctggctcaggatgaacgctggcggcgtgcctaacacatgcaagttgagcgatttacttcggtaaagagcggcggacgggtgagtaacgcgtgggtaacctaccctgtacacacggataacataccgaaaggtatgctaatacgggataatatatttgagaggcatctcttgaatatcaaaggtgagccagtacaggatggacccgcgtctgattagctagttggtaaggtaacggcttaccaaggcgacgatcagtagccgacctgagagggtgatcggccacattggaactgagacacggtccaaactcctacgggaggcagcagtggggaatattgcacaatgggcgaaagcctgatgcagcaacgccgcgtgagtgatgaaggccttcgggtcgtaaaactctgtcctcaaggaagataatgacggtacttgaggaggaagccccggctaactacgtgccagcagccgcggtaatacgtagggggctagcgttatccggatttactgggcgtaaagggtgcgtaggcggtctttcaagtcaggagtgaaaggctacggctcaaccgtagtaagctcttgaaactgggagacttgagtgcaggagaggagagtggaattcctagtgtagcggtgaaatgcgtagatattaggaggaacaccagttgcgaaggcggctctctggactgtaactgacgctgaggcacgaaagcgtggggagcaaacaggattagataccctggtagtccacgctgtaaacgatgagtactaggtgtcgggggttacccccttcggtgccgcagctaacgcattaagtactccgcctgggaagtacgctcgcaagagtgaaactcaaaggaattgacggggacccgcacaagtagcggagcatgtggtttaattcgaagcaacgcgaagaaccttacctaagcttgacatcccaatgacatctccttaatcggagagttcccttcggggacattggtgacaggtggtgcatggttgtcgtcagctcgtgtcgtgagatgttgggttaagtcccgcaacgagcgcaacccttgtctttagttgccatcattaagttgggcactctagagagactgccagggataacctggaggaaggtggggatgacgtcaaatcatcatgccccttatgcttagggctacacacgtgctacaatgggtagtacagagggttgccaagccgtaaggtggagctaatcccttaaagctactctcagttcggattgtaggctgaaactcgcctacatgaagctggagttactagtaatcgcagatcagaatgctgcggtgaatgcgttcccgggtcttgtacacaccgcccgtcacaccacgggagttggagacgcccgaagccgattatctaaccttttggaagaagtcgtcgaaggtggaatcaataactggggtgaagtcgtaacaaggtagccgtatcggaaggtgcggctggatcacctcctttctaaggagaattgcctactgtttaattttgaaagttctttacgaactttatatatgggggtgtagctcagttgggagagcacttgccttgcaagcaaggggtcaggagttcgactctcctcatctccaccatttaagagtatattacttaaatctttgatttacttagtagcctcttacaatgcacttatagcttaaatttatacaagctttgtgcgttagcactttaagcaacagaataaactgaacgtatgtgaagtttgtttgttggcgctgtgctttagcactttgaaaactgcatatatatatttagtgatatgacatctaatttgtaatatataaagctgataactttttaaaattatcgaagttgatagcttctaatctatcaaacctttttaactggtcaagttattaagggtgcagggcggatgccttggcactaggagccgatgaaggacgtgataagctgcgataagcttcggggagttgcacgtaaactttgatccgaagatttccgaatgaggaaactcacttagagtaatgtctaagtatcattaagtgaatacatagcttaatgaggggaactcagggaactgaaacatctaagtacctgaaggaagagaaagaaattcgattccgtaagtagcggcgagcgaacgcggattagcccaaaccaataaagttttctttattggggttgcggacatatcataacgaagaggtatcgtaattgaagaggtttggaaagacccaccacagaaggtaatagtcctgtatgttaaacgagaagacttcagatatgatccagagtaccacgggacacgtgaaaccctgtgggaagcaggagggaccaccctccaaggctaaatactacctagtgaccgatagcgtatagtaccgtgagggaaaggtgaaaagaaccccgggaggggagtgaaatagaacctgaaaccctgcacttacaagctgtggaagcacatttcttgtgtgaccgcgtactttttgtagaacgggccaacgagttacgttaagtagcaaggttaagcacttaaggtgcggagccgtagcgaaagcgagttttaactgagcgttcagttacttgacgtagacccgaaaccgggcgacctacccatgagcaggatgaagcgaaagtaaaatttcgtggaggtccgaacccacgagcgttgaaaagctcggggatgacttgtgggtagcggtgaaattccaatcgagcccggagatagctggttctccccgaaatagctttagggctagcctcaaggtgagagatacggaggtagagcactgaatgtcctagggggtattgcacctaccgaagactatcaaactccgaatgccgtcatcttatacttgggagtcagactgtgggtgataagattcatagtcgaaagggcaacagcccagatcgtcagctaaggtccctaaatgtaagttaagtggtaaaggatgtgggattgcacagacaaccaggatgttggcttagaagcagccactcattcaaagagtgcgtaatagctcactggtcgagtgatcctgcgccgaagatttccggggctaaaacttactaccgaagctacggcatcagtaatgatgggtaggggagcttcccatacgggttgaagcatgaccgtaaggacatgtggacagtatgggagtgagaatgttggcatgagtagcgagatgtgggtgagaatcccacaggccgtaaacccaaggtttccaggggaaggttcgtccgccctgggttagtcgggacctaagctgaggccgaaaggcgtaggtgatggacaacaggttgatattcctgtactaccgataaccgtttgagagaagggatgacacagtaggataagctaagcacactgttggttatgtgtgcccaagcattgaggcagtcaaagtaggcaaatccgctttgataatgctgggatgtgatggggagcgaaatttagtagcgaagtagctgatttcacactgtcaagaaaagtctctatcgaggttaaaggtacccgtaccgcaaaccgacacaggtgggtgaggagagtatcctaaggccagcgagagaactgttgttaaggaactcggcaaaatgaccccgtaacttagggataaggggtgccaccatcaggtggccgcagagaataggcccaagcgactgtttaccaaaaacataggtttctgctaagtcgcaagacgatgtataggagctgacgcctgcccggtgctggaaggttaaggggatctgttagagcaatcgaagcagtgaacttaagccccagtaaacggcggccgtaactataacggtcctaaggtagcgaaattccttgtcgggtaagttccgacccgcacgaaaggcgtaacgatttgggcactgtctcaacaacagactcggtgaaattgtaattccggtgaagatgccggatacctgcgacaggacggaaagaccccatggagctttactgtagcttgacattgggtcttggtactacatgtacaggataggtgggaggctttgaaaccaggacgccagttttggcggagccatccttgggataccacccttgtagtactgggactctaaccataggccatgaatctggtcttgggacactgtcaggtgggcagtttgactggggcggtcgcctcccaaaaggtaacggaggcgctcaaaggttctctcagtacggtcggaaatcgtacgtagagtgtaaaggcaaaagagagcttgattgcaagacatacaggtcgagcaaggatgaaaatcggacttagtgatccggtggttctgcgtggaagggccatcgctcaacggataaaagctaccctggggataacaggcttatctcccccaagagtccacatcgacggggaggtttggcacctcgatgtcggctcatcacatcctggggctgtagtaggtcccaagggttgggctgttcgcccattaaagtggtacgcgagctgggttcagaacgtcgtgagacagttcggtccctatccgtcgcaggcgtaggaaatttgagaagacctgtccttagtacgagaggaccgggatggacgtacctctggtgtaccagttgtcctgccaagggcatggctgggtagctatgtacggaatggataagcgctgaaagcatctaagcgcgaagccaacttcaagataagatttcccaccgcaagggtaagaccccagaaagactatctggttgataggtcgaaggtgtaagtgcagcaatgtatttagcttatcgatactaataggtcgaggacttgaccaatattatttgatgtcattcattaagatatatgtgcagtttttagagtgctaaatctatatttttaaacttgtcaaaacttatggatttttaatagttttataaggcaaaaaatcgaataaaaaaagtattgacacaataagacaaagatgttattataatacttgtcttagaaaaaaagttaaatgaaaatttagacaataatctggttataatagcagagaggatacacctgttcccattccgaacacagaagttaagctctctagcgctgatggtacttggtgggaaactgcctgggagagtaggacatagccaggtgatgtgccgaagtggcggaactggcagacgcacaggacttaaaatcctgcgggacttacctctcgtaccggttcgattccggtcttcggcaccacaaattattgtgggccattagctcagttggttagagcgcccggctcataaccggtaggtctggggttcgagtccctgatggcccaccacaataatttaaagaactttgaaaattaaacagtaggttaatttataaacaagaaacaaaccataaagccagatattttgataacaatagtatctgagcctgataaacttttatttgagagtttgatcctggctcaggatgaacgctggcggcgtgcctaacacatgcaagttgagcgatttacttcggtaaagagcggcggacgggtgagtaacgcgtgggtaacctaccctgtacacacggataacataccgaaaggtatgctaatacgggataatatatttgagaggcatctcttgaatatcaaaggtgagccagtacaggatggacccgcgtctgattagctagttggtaaggtaacggcttaccaaggcgacgatcagtagccgacctgagagggtgatcggccacattggaactgagacacggtccaaactcctacgggaggcagcagtggggaatattgcacaatgggcgaaagcctgatgcagcaacgccgcgtgagtgatgaaggccttcgggtcgtaaaactctgtcctcaaggaagataatgacggtacttgaggaggaagccccggctaactacgtgccagcagccgcggtaatacgtagggggctagcgttatccggatttactgggcgtaaagggtgcgtaggcggtctttcaagtcaggagtgaaaggctacggctcaaccgtagtaagctcttgaaactgggagacttgagtgcaggagaggagagtggaattcctagtgtagcggtgaaatgcgtagatattaggaggaacaccagttgcgaaggcggctctctggactgtaactgacgctgaggcacgaaagcgtggggagcaaacaggattagataccctggtagtccacgctgtaaacgatgagtactaggtgtcgggggttacccccttcggtgccgcagctaacgcattaagtactccgcctgggaagtacgctcgcaagagtgaaactcaaaggaattgacggggacccgcacaagtagcggagcatgtggtttaattcgaagcaacgcgaagaaccttacctaagcttgacatcccaatgacatctccttaatcggagagttcccttcggggacattggtgacaggtggtgcatggttgtcgtcagctcgtgtcgtgagatgttgggttaagtcccgcaacgagcgcaacccttgtctttagttgccatcattaagttgggcactctagagagactgccagggataacctggaggaaggtggggatgacgtcaaatcatcatgccccttatgcttagggctacacacgtgctacaatgggtagtacagagggttgccaagccgtaaggtggagctaatcccttaaagctactctcagttcggattgtaggctgaaactcgcctacatgaagctggagttactagtaatcgcagatcagaatgctgcggtgaatgcgttcccgggtcttgtacacaccgcccgtcacaccacgggagttggagacgcccgaagccgattatctaaccttttggaagaagtcgtcgaaggtggaatcaataactggggtgaagtcgtaacaaggtagccgtatcggaaggtgcggctggatcacctcctttctaaggagaattgcctactgtttaattttgaaagttctttacgaactttatatatgggggtgtagctcagttgggagagcacttgccttgcaagcaaggggtcaggagttcgactctcctcatctccaccatttaagagtatattacttaaatctttgatttacttagtagcctcttacaatgcacttatagcttaaatttatacaagctttgtgcgttagcactttaagcaacagaataaactgagcgcatgtgaagtttgtttgttggcgctgtgctttagcacttttagtaacggaataatctgagtgaatacgaaggttgttcgttgacgtggtgcgttagcactttaagcaacggaatttattcgttggcgccgcgctttagcactttgaaaactgcatatatatttagtgatatgacatctaatttgtaatatataaagctgataactttttaaaattatcgaagttgatagcttctaatctatcaaacctttttaactggtcaagttattaagggtgcagggcggatgccttggcactaggagccgatgaaggacgtgataagctgcgataagcttcggggagttgcacgtaaactttgatccgaagatttccgaatgaggaaactcacttagagtaatgtctaagtatcattaagtgaatacatagcttaatgaggggaactcagggaactgaaacatctaagtacctgaaggaagagaaagaaattcgattccgtaagtagcggcgagcgaacgcggattagcccaaaccaataaagttttctttattggggttgcggacatatcataacgaagaggtatcgtaattgaagaggtttggaaagacccaccacagaaggtaatagtcctgtatgttaaacgagaagacttcagatatgatccagagtaccacgggacacgtgaaaccctgtgggaagcaggagggaccaccctccaaggctaaatactacctagtgaccgatagcgtatagtaccgtgagggaaaggtgaaaagaaccccgggaggggagtgaaatagaacctgaaaccctgcacttacaagctgtggaagcacatttcttgtgtgaccgcgtactttttgtagaacgggccaacgagttacgttaagtagcaaggttaagcacttaaggtgcggagccgtagcgaaagcgagttttaactgagcgttcagttacttgacgtagacccgaaaccgggcgacctacccatgagcaggatgaagcgaaagtaaaatttcgtggaggtccgaacccacgagcgttgaaaagctcggggatgacttgtgggtagcggtgaaattccaatcgagcccggagatagctggttctccccgaaatagctttagggctagcctcaaggtgagagatacggaggtagagcactgaatgtcctagggggtattgcacctaccgaagactatcaaactccgaatgccgtcatcttatacttgggagtcagactgtgggtgataagattcatagtcgaaagggcaacagcccagatcgtcagctaaggtccctaaatgtaagttaagtggtaaaggatgtgggattgcacagacaaccaggatgttggcttagaagcagccactcattcaaagagtgcgtaatagctcactggtcgagtgatcctgcgccgaagatttccggggctaaaacttactaccgaagctacggcatcagtaatgatgggtaggggagcttcccatacgggttgaagcatgaccgtaaggacatgtggacagtatgggagtgagaatgttggcatgagtagcgagatgtgggtgagaatcccacaggccgtaaacccaaggtttccaggggaaggttcgtccgccctgggttagtcgggacctaagctgaggccgaaaggcgtaggtgatggacaacaggttgatattcctgtactaccgataaccgtttgagagaagggatgacacagtaggataagctaagcacactgttggttatgtgtgcccaagcattgaggcagtcaaagtaggcaaatccgctttgataatgctgggatgtgatggggagcgaaatttagtagcgaagtagctgatttcacactgtcaagaaaagtctctatcgaggttaaaggtacccgtaccgcaaaccgacacaggtgggtgaggagagtatcctaaggccagcgagagaactgttgttaaggaactcggcaaaatgaccccgtaacttagggataaggggtgccaccatcaggtggccgcagagaataggcccaagcgactgtttaccaaaaacataggtttctgctaagtcgcaagacgatgtataggagctgacgcctgcccggtgctggaaggttaaggggatctgttagagcaatcgaagcagtgaacttaagccccagtaaacggcggccgtaactataacggtcctaaggtagcgaaattccttgtcgggtaagttccgacccgcacgaaaggcgtaacgatttgggcactgtctcaacaacagactcggtgaaattgtaattccggtgaagatgccggatacctgcgacaggacggaaagaccccatggagctttactgtagcttgacattgggtcttggtactacatgtacaggataggtgggaggctttgaaaccaggacgccagttttggcggagccatccttgggataccacccttgtagtactgggactctaaccataggccatgaatctggtcttgggacactgtcaggtgggcagtttgactggggcggtcgcctcccaaaaggtaacggaggcgctcaaaggttctctcagtacggtcggaaatcgtacgtagagtgtaaaggcaaaagagagcttgattgcaagacatacaggtcgagcaaggatgaaaatcggacttagtgatccggtggttctgcgtggaagggccatcgctcaacggataaaagctaccctggggataacaggcttatctcccccaagagtccacatcgacggggaggtttggcacctcgatgtcggctcatcacatcctggggctgtagtaggtcccaagggttgggctgttcgcccattaaagtggtacgcgagctgggttcagaacgtcgtgagacagttcggtccctatccgtcgcaggcgtaggaaatttgagaagacctgtccttagtacgagaggaccgggatggacgtacctctggtgtaccagttgtcctgccaagggcatggctgggtagctatgtacggaatggataagcgctgaaagcatctaagcgcgaagccaacttcaagataagatttcccaccgcaagggtaagaccccagaaagactatctggttgataggtcgaaggtgtaagtgcagcaatgtatttagcttatcgatactaataggtcgaggacttgaccaatatttatttgatgttcattgattaagatatatgtgtagtttttagagtgctaactctaaagaaactagtattgctaggttctataaacttattaaaaacttaatagaaatattaagcataaagattatgtggttacaatagcagagaggatacacctgttcccattccgaacacagaagttaagctctctagcgctgatggtacttggtgggaaactgcctgggagagtaggacgtagccacgttaaatgttccaaggtagctcaacggtggagcaaccggctgttaaccggtaggctgtgggttcgagccccacccttggagccaaaaaagccgaagtggcggaactggcagacgcacaggacttaaaatcctgcgggacttacctctcgtaccggttcgattccggtcttcggcacttataaaacaatatcgcggggtggagcagttggcagctcgtcgggctcataacccgaaggtcgtaggttcaagtcctgcctccgcaaccattaaaacggctcgttggtcaagaggttaagacaccgccctttcacggcggtaacaggggttcaattcccctacgagtcaccaattcaattaaatatgcgggtgtagctcaatggtagagttctggccttccaagccagctgtgagggttcgatccccttcacccgctccaaaaatgggaccatagctcagctgggagagcacctgccttacaagcagggggtcacaggttcgagccctgttggtcccaccattcgcggcctggtagttcagttggttagaatgccagcctgtcacgctggaggtcgagggttcgagccccttccaggtcgccaaattaaataagcgggaatagttcagtggtagagcgcaaccttgccaaggttgaagtcgcgagttcgaatctcgtttcccgctccataataacttgggtgcatagctcagctggatagagcaacgcccttctaaggcgtgtgtccggggttcgaatccctgtgcgctcattaagaaaagtttactataaattatagtaaacttttatattgtttaaaaagacacaggaaacatgtatattacctgtgtctttttatttataaactttaaactatgtaaaaattacagtatattctaatagagttacagtatattcattaatattgtaaacatacggagggtaatgtataatagtctacaagatgtttatgaaggcatcagttaaatataactaattagataagagttatatacattatattgtatactttatggtatttatatattgaaataacttatgaaattatttataaagagatttatgagcatatttttgtctaaacaataagtataagaaattataaaaaattagagactatagtgaattgacaatttaatgtaatatttataagttatactaagtaaattattatactgtgaaatggatatataactttaggtattgtgtattattttcactgtaggagattatatctagttatacataataagttttaatgatagtttatagtaagatattaaaataaatttatctaatctagatatgaaataagttattactttaatataaaaatgaatctaatggaataatattgatgataagtaatatttagattttgtatttgtttatagttaataagtggattatagaatttataataattaatatatattaaacaaagatatattaagatattttagaacataaaactgcattaaggcgcgagtactattttgtattcgcgccttgatggtttgagttatttgagtaaaaactaactttaataagaaatatgtatttattaagttgatatttttaatgtgtttagagattatttaacaatctccaaatataaaactagaattatttacataaaagttaaatagtttgtatagagttagatttatatagtataatacttagtgtaaataattaagaagttatcaaacaggaggataaaactgtgttagatataaattcttttttaaatggattttttaatataatattaagaatgagtatatatgatttaattgacatatctatagtagcgtatattttttacaaaatatttatgtttataaaagatacaagagcagaacaagtgtttaaaggtataatatttcttttattagcaactcaacttagtaacacctttaaattgcataccgtttattggatatctcttaaagctttagattatggagttatagctgctcttataatttttcaaccagaatttagagcaggacttgaacatataggaagagcaaagtttaatttatttggaaagaatgtaaatacttctgaagaaactctcaatagaaatatagaagaaattgtagaagctttatattcactttctagacaaaaaataggagctcttatcataatggagagagaaactagaataagtgatataataaatacaggaactattattgatgctgaaatttctaggcaactattaataaatatatttataccaaatacaccattacacgatggagctgttgtaattagagattctaaggtaaaagcagctgcatgttttttgccattgacggaaagtaaggatttaagtaaagatttgggtactagacatagagcaggaataggggtaagtgaggtgtctgactgtataactctgattgtatcagaggaaacaggtggcgtatcaattgctaaagcaggtaagttatatagagatatttctagagaaagaatgatgaatatattacgtagtaatttaaaaacaaatacagaaacaagaagttttttcaaaggtggtatatttaaatgataaatagactaaaaaataataccaaaataaaaataatatcatttttaagtgcaattgcattatggatgtatgttatggctgtagttgaccctgaagaaactaaagggtttgaagatatacctgtatctataagtaatatgagtgatttaaaggataaaaatcttgttatatatccagacgaaaaattaacagcagatgtatatataaaaggtagtttatcaaaggtacaaagtgttaagaaagaagatatacatgtatatggaaccattgaagacccaatacaaggacagaaggaagtatatttaaaagcaaatattcctcaaggtgttactctagaatttaagcatgatgttttagtagtaaatcttgaaaaaaacataaaagaaaaaagagatataaaggtagaagtaagtggaaattcaaaaagaaatataaataaaattgaacttagtaaggaatttgtcgatgtatcaggtccaagaactctagttaaagaagtcaaaagtgtaagagctaatctagatgttggtaatgagacagatgatttttctaaaaaattgcaattaataccattaaatagtgatggaactaaggttgaaggagtaacattaagttcatcctttgtgactgcaaagatagaactattgaaggaaaaaattgtcccaataagagtaagtctaaatgataataaagataatgatgtactgaaaaactataaattaagtaaggaacaagttacaataaaaggaaagaaagaagatatagacaaaataagttatattaagacaaaacctattgacttagctgatttggctaatggtgaagaaaaagaagttagcttagaaattccagagggtataactcttgaggatagctctataacaattaaattaaatgatacaaaacaattgagtgcagaatttttatataatgcgggagatattgaattaagaaatatcccaacaaatatagataatccaaatgtaatttctgatgtagatataaaagttgttgtagagtcaacggaggatttgagtaagttaaataaaaaagatatttcattatatattgatttatcacaaggccctgaggaagatagtaaatataaaataaaatatgaaacaacatatcaatttaaaaaaataaatatagaacctaatattgttgaagtggaatgaacaaatatttcgaatatttagttgttacaagatgcgacaaaaaaacctataaaattaagtttgttaattttatgtttttgttgcatcttgtttattttagttatattataaaataaggacaatgagatatttgttaaatctaaaaagcgctagatatatgaaaaaagactgataaatagatttaaataaatattttgaattaaatatttcaattatctctaggaaaacgttgctgaacgagttataatttaattgagatataaaaagttctatttcaaaaaattcaagatgaggtggaaatgcatgagaagttttgaagaagtaattaagtttgcaaaagaaagaggacctaaaactatatcagtagcatgttgccaagataaagaagttttaatggcagttgaaatggctagaaaagaaaaaatagcaaatgccattttagtaggagatatagaaaagactaaagaaattgcaaaaagcatagacatggatatcgaaaattatgaactgatagatataaaagatttagcagaagcatctctaaaatctgttgaattagtttcacaaggaaaagccgacatggtaatgaaaggcttagtagacacatcaataatactaaaagcagttttaaataaagaagtaggtcttagaactggaaatgtattaagtcacgtagcagtatttgatgtagagggatatgatagattatttttcgtaactgacgcagctatgaacttagctcctgatacaaatactaaaaagcaaatcatagaaaatgcttgcacagtagcacattcattagatataagtgaaccaaaagttgctgcaatatgcgcaaaagaaaaagtaaatccaaaaatgaaagatacagttgaagctaaagaactagaagaaatgtatgaaagaggagaaatcaaaggttgtatggttggtggaccttttgcaattgataatgcagtatctttagaagcagctaaacataaaggtataaatcatcctgtagcaggaagagctgatatattattagccccagatattgaaggtggtaacatattatataaagctttagtattcttctcaaaatcaaaaaatgcaggagttatagttggggctaaagcaccaataatattaacttctagagcagacagtgaagaaactaaactaaactcaatagctttaggtgttttaatggcagcaaaggcataattttaagggggaaataggcaaatgagcaaaatatttaaaatcttaacaataaatcctggttcgacatcaactaaaatagctgtatttgataatgaggatttagtatttgaaaaaactttaagacattcttcagaagaaataggaaaatatgagaaggtgtctgaccaatttgaatttcgtaaacaagtaatagaagaagctctaaaagaaggtggagtaaaaacatctgaattagatgctgtagtaggtagaggaggacttcttaaacctataaaaggtggtacttattcagtaagtgctgctatgattgaagatttaaaagtgggagttttaggagaacacgcttcaaatctaggtggaataatagcaaaacaaataggtgaagaagtaaatgttccttcatacatagtagaccctgttgttgtagatgaattagaagatgttgctagaatttctggtatgcctgaaataagtagagcaagtgtagtacatgctttaaatcaaaaggcaatagcaagaagatatgctagagaaataaacaagaaatatgaagatataaatcttatagttgcacacatgggtggaggagtttctgttggagctcataaaaatggtaaaatagtagatgttgcaaacgcattagatggagaaggacctttctctccagaaagaagtggtggactaccagtaggtgcattagtaaaaatgtgctttagtggaaaatatactcaagatgaaattaaaaagaaaataaaaggtaatggcggattagttgcatacttaaacactaatgatgctagagaagttgaagaaagaattgaagctggcgatgaaaaagctaaattagtatatgaagctatggcatatcaaatctctaaagaaataggagctagtgctgcagttcttaagggagatgtaaaagcaatattattaactggtggaatcgcatattcaaaaatgtttacagaaatgattgcagatagagttaaatttatagcagatgtaaaagtttatccaggtgaagatgaaatgattgcattagctcaaggtggacttagagttttaactggtgaagaagaggctcaagtttatgataactaatgataaaagaataagaatcataactggtcactatggaagtggtaaaagtgaatttgcgatgaactatgttgttaagttaagagatatggtttctggcaaagttgctatagccgatttagatgtggtaaatgtatactttagaactagagaaaagaaagagttaatgaaatccttaggtatacaaccaatagatagctcaattaatgctccaacattagatttaccagcagtatcagcagaggtaatgtctcctatggtagaccattcatacaattctgttatagatttaggtggagataatgtaggtgctagggttataggaagatttagtcatttgttaaaagaaggcgattatgatatgctttttgtaataaatgcaaatagggagaaaactcaaacttctgaagaagttatccaatatataaaagaaatagaaaaatcttctaaattaaaggtaacaggtctaattaataatactcatcttattaggtttactactattgatgatgttttaagaggtcagaaagttgcaaaagaagtttctgaaaaatgtaatataccgataagatatgttgcatgtttagaaaatcttgttgaacagttaccaaaagatttagaaggagaaatttttcctataaaattatatatgagagaagactggatgtagtttgagctcaaatatatagaaagtttaaggaggcttaggtaaatggctaaaggaaaagtatcttttaatcaagaacgttgtaaaggttgtggattgtgtgttgaagcatgtccagtaaaaatcatacaattagactcaaatgtaataaacaaaaaagggtataacccagcaactgtttttgaaatggaaaaatgcataggatgtgcaagttgtgcaactatgtgtccagatgtagttataacagtagaaagagattaatttaattaatatttaagggggaattttaatggctaagatacttatgaaaggtaacgaagcatttggaaaagcagctatagaagctggttgcaaatatttcttcggttacccaataactccacaaagtgaattaccagaatatttatcaagagagttacctaaaataggtggagcgttcgttcaagctgaatcagaagtttctgcgataaacatggtttatggtggagcaggtgcaggagcaagagttatgacttcttcatcttcaccaggagttgctttaaagcaagaaggtataacatatgcagtaggagcagaagttccttgtgttgtacttaatgtaatgagaggtggtccaggacttggaagtatacaaccttcacaagctgactactttatgtctacaagaggtggaggaaatggagactacagaactccagtattcgcaccagctacagttcaagaagctgttgatatgataatggaagcttttgacgttgcagattattacagatcaccagttatggtagttgcagatggtatgataggtcaaatgatggagccagttgaatttagagctcctgagaagaaaagagaattgcctcctaaagattgggcaactgttggaactaaaggaaaaagaaaacctaatgtaataaactctctatacttagaaccagaagtactagaagaccattgttggcatttacaagaaaaatttgatgcaatggaaaagaatgaagtacaatacgaaatgtacaaaacagaagatgctgaatttgtatttgcagcttatggaactacttcaagagtagtaaaaagcgcaattgatatattaagagaagaaggaataaaagcaggtcttataagacctaaagtattatggccattcccattcgaagcattcaaccaaattcctaatgctagaaacatattgactgttgaaatgagtatgggacaaatggtggaagatgttaaaatggcagtagaaggtaaattaccagtttacttccatggaagaccaggaggaatgactccaacaccagcagaaatagttgaaaaagctaaaaaaattattgccggagaattggttgcaggaggtgctagataatggctgttgtatttaagaaaactgaaggattacaagatactcaaactcactactgtccaggatgtacacatggtataatccatagattagttggtgaagtattagaagaactaggagtattaggtgatgctgtaggtgttgttccagttggatgttcagttttaggatataaatattttaactgtgacactcaagaagctgctcatggtagagcgccagctgctgctacaggaataaaaagagttcatcctgaaaatacagtattcacttatcaaggtgatggagacttagcttcaattggtactgctgaaatagttcatgcagctgctagaggagaaaaaataactactatatttgtaaacaatacaacttatggtatgactggtggacaaatggctccaactacattagttggacaaagagctactactgctcaatcaggaagaaatgctgaaactcaaggttatccaataagagtaagtgaaatgttagctacattaacaggagctgtatttgtagaaagagtagcagttgatactccagctcatgttagacaagctaaaaaagctataaagaaagcattccaagttcaacaagcaggattaggatttggaatagtagaagtattatctacttgtcctacaaactggggactagctccaaacgatgctttacaatggttaagagacaacatgataccatactatccattaggaaatttcaaaaatgttgaagttgaggaggtgaagtaaatgtctacagctagagtaatatgtgcaggcttcggaggccaaggtgttatgtctatgggacaattacttacttatgcaggaatgctagaaggaaaagaagtttcttggttaccatcttatggaccagaaatgcgtggaggtacagcaaactgtgcagtaactgtatctaatgagccagttggttctccacttataacagatgatgcaactgcagctatattattaaatataccagcatttgaaaaattcaaagatgatgttattcctggtggaaaaataatagtaaatagttctttaataaaagaaaaagttgatagaacagatgtagatgtttattatataccagcaaatgaattagcagctgaattaggaaatgataaagttgctaatatgataatgttaggcgcttacttaaaagtatctgatactgtagatatagaatctgtactagaagcattcaaaaaagttttcggacctagaaaagaaaaattcgttccattaaacagagaagctttacaaaaaggtatggatgctacatgttctaaagcaactaactaataaagaaaaagatgtcaaaaaaaagacaatagaattatttctattgtcttttttgctgataagtattaaaatgtttttatgactgaaattaagcctataatgatattttatgaactataaaaatataatacaaattacaagcttttcaattatgaaaggagaatctttagtgagaaagtattttggaacagatggagttagaggagtagcaaatacagaactaacatgtgatttagcatataaacttggtagagctggtggatttgtcttagctcaaggagaccacagagtaaaagtagtagtaggtaaggatactagaatatcaggtgatatgttggaagcatctttaatagcaggacttatgtctgttggatgtgatgttattactgttggaataataccaacacctgcagtggcatatttaactagaaaatatggtgctgattgtggtgtggttatatctgcatctcacaatcctgttgaatataatggaatcaaattctttaataagaatggatataaattagatgatgaaattgaattgaaaatagaagaatatatagacgatatagacaaaattgattgtcttccaattggtgaaaatgtaggaagaaaattacatgaacattgtgcacaaagagactatgtagactacctaaaatcaataataagcactgactttaagggattaaaagtagttttggactgtgctaatggtgcgtcatataaagtggcaccaatagtgtttgatgaactaggagcaagtgtaatttcaataaatagttcaccagatggaaataatataaactataaatgtggctctacacatccagaacaacttcaaagggctgttttggaacataatgctgacttaggtcttgcatatgatggagatgctgatagattaattgcagtaaatgaaaagggtcaaattgttgatggagaccatataatgatattgagtgccttaaatttaaagaaaaataataaattggcgcaagatactttggtagttacagttatgagtaatatagggttgacaatagctgctaaggaaaatggaataaatttatctactacagcagttggagacagatatgttttagaagatatggttaaaaatggatataatcttggtggagagcaatctggacatatgatatttttagattacaacactactggagatggagtgcttagttctctaatacttgcaaatataatcttgcaagaaaagaaacctttatcagaaattgcatcaataatgagccaatacccacaagtattagtaaatgcaacaataaaaaatgaaaataagaacaaatatatggaatatccagaaataaaaactgagatagaaagaatagaatctattttaaacggaaatggtagagttttgataagaccatcaggaactgagccattagttagagttatgttagagggtaaagaggaaggtcaaataaaagaattagcaacaaacttagctaatcttatacaagaaaaattatcgtaatttaaagggtattctcagatacaaatactgaggacacctttctaagcgccagaacttagttatagacataattattgagtaatataggaactaagttgacgaggtcagagttaatcgaattgtcggcggatgctctgcggtgtgtttaccatcgaaagacttctttaaataataggagcaatcctatggacaaagggaagccaaagtaaacttatatgacctaactcttaaaatatataaataatatttttaggaggacacaaataatgtgtggaatagttggatatttaggaagtagaaaggcagcagaagttatagtagaagggctttctaagctagagtacagaggttatgactcagcaggagtagcagttaatagttctaatgaagaagaacttaatattagaaagtttaaaggtagactttctgtacttgcagaagacttagaaaagaatcctattgatggaaatttaggtatagggcatacgagatgggcaactcatggagaaccatctgatgtaaactcacatcctcattttaatcaagccaaaacaatagcagttgttcataatgggataatagaaaactatatggaaataaaagaagaattaatttctgaaggtgttaagtttgaatctcaaacagatacagaggtaatagcacatttagtagataaatactatgagggtaatttattagatgctgtatacaaaactatatcaaaattaagaggagcttatgcattaggtgttatatgtaaagaacatggaaatgaattagttgcagtaagaaaagatagtcctcttgtagttggtgttggtgaaggtgaaaactttatagcatcagatatacctgcattattaaaatatactagagatgtttatttcttagaaaatggagaagtagttcatctaaaagacgaaaatgtaacagtttatgactctaatagaaatcttgttgaaaaagaagtatttcatgtaacttgggatgtagaagctgcgtctaaaggtggatatgactactttatgtcaaaagaaattcatgagcaaccaacaggagttagagaaactttagaaagaagacttgatgataatggaaatataattctagacagtataaatatttctaaagaagacttagaaaaaataaataaagtttatatagtggcttgtggaacagcatataatgctggattacttggtaagtatgccatagaaaaatttgtaaatataccagtaataactgatatagcatcagaatttagatatagcgacccatttgtagatgaaaattcattagtaatattagttagccaatctggtgagacagcagatactctagcagtattaagagattcaaaggctaaaggagcaagaatactttcaataactaacgttgtaggttcatctatagcaagagaatcagatgatgtattctatacttgggcaggacctgaagtagcagttgcatcaactaaggcatatactactcaaataacttctttatacatgatagctttagactttgctatcaaaaaaggaacaataactagagaattttatgatagtatgatttctaagatgaaagaaataccatcaaaaatacaagaaatattagacaatgaagaatatataaaagaagttgctaaaacagttgttagttctgaacatgcattctatttaggaagaggtatagactatagcttagcaatggaaggttcattgaaattaaaagagatttcatatatacatgcagaagcttttgcagcaggagagctaaagcatggaacaatagctttaatagaaaaaggaactcctgtaattgccatagctactcaagaaaagttatttgaaaaaatggtttctaatatggaagaagtaagagcaagaggagcttatgtagtagcaatagctcaaagccataataaggatgttgagaaagctgctgataaaataatctatataccaaattcagatgatattttatcaccaatattagcagttgtaccaatgcaattacttgcgtatcatgtctctgtactaagaggatgcgatgtagataagccaagaaatctagctaaatcagtaacagttgaataaaaacagattaaaaattaaatagataatatttattgaaaaaaactcatcctgttatttgtattttataggatgagttttttagataaatattaaatttgttttgtttttgctataataaattttataaaaagattgatattaaatcatctgtaaaatgataaatatatagaccataccaggtatagggaacgataaatatagttcatataaaatatagtgagtacttaataaacatatagtcaatatcagacataaaaaaataatagcttatgagaaaaattaaaatacaaggtattagtaaccttgtgataagataaagtgagtagtttaaaataagaatataaggaactatttataaaagaatataatgaagctaatagagtataagaaaattactttattttagtaaaataatttcaaataaaaatttttttaaattgggagtataaattatgacaaatgattttaaaaaagaaaagaaagaagattattttgttaatcttaaggcaatatctactgaagttttacaagaaaaaatgcaagataacgcttgggttatagttgatactcgcttaaatgatgcttataatggctggaagttagatggagtaaaaagaggtgggcatataaaaagagcagtagatttttctgctaattggttaaatgtatactcagatagaaaagatgaagtgctagaacaagcattgaaaactaaaagaattgatttagataaaaatatagtattgtatgatgcaaatggaaaagatgctttggttgtagcagattatttatctaaaaaaggatataaatatctatataaatatgatattaaacaatgggcagacgatgaaaatcttccaatggaaagatataaaaattatcaaatgatagttcctgcttttataataaaagatatattagatggaaaaattcctgagacatttgaagattcaaagaatataaaaatgattgaagcgagttggggagaagaatcgtatacaaaagggcatatacctacaagtgttcatgtaaatactgatattatagaacctcctccaacatggatgcttgataatgatgataacttaactaagtttgctttagactatggactaacaaaggatgatactgtaatagtttcaagtattacacctatggcatcttatagactagctgttatattgagatatataggagtaaaagatgtaagagttttgaatggtggaacaaactcatggttatcagcaggatatgaattagaatttattagtaatccaaaacattcatgtactaattttggagcagatataccagttaactcacaattagttgttactacatctgaattaagacaaaaactaaaagaaaaaaataagtttatactagtagataatcgtacttgggatgaacatataggaaaagtatctggatatacatattatgataaaaaagggcgtataccaggagctttatatggacattcaggtagtaatagtgtttcactagaagaatatcgtaatattgataatacaatgagaaataaatctgagattttagaaatgtgggacaaggaaaatatagatgtgaataaacagcttatatttatgtgtggaagtggatggcgtgctgctgaagtattaacatatgcaaatgtcataggagtggaaaatacctccctttatagtgatggatggatgggctggagtcttgataattcaaatttaattgaagtgggagaacacaaataaagtttttgaaagtacaatagagttgtttaaaacaaaggtgtttttgatttattaggaagagtgtgtaaattgtgtattgggaagtgtacttaggtatgttcatttggagctatggaaattgataaaaaagtattatctgtttattttgctggtaaaatatgaatagattatagattatagattatagattatagattatagattatagattatagattatagattatagatttaagtatagactaagtaatttatattacagaagataatatataagaattaatgcaagatgtatttgatacatataaggaattggcaagtccaggagaaggatagagaaaattgagattgaagagtttgaaagagattattagatgaaaaatacaaaaatgtataaaaatacatattgagaaagtatatctctcttaaatttgttaataattctattatacagaaaaacatatttaagggggattttttactatgaaaaaagtaaaattagctataagcttttttatattaatgattataggaatgacaatatcttatgcagatacaagtataaatactagatacaatagattaagtaaagctcttgaaatatcagaagcaaattttaaattttataatgttaaaattaattctgttataaatcataatttatcaaataaagaatttcataatatttttatagaaataattaacaatctaaagttggataaaaaaggaataaattggaatcaaaaagggtctggcgataaaatacaattatgtgctactataaaaggtagcgataaagaaatttctataaaaggaataaataaaaataacaaagaaagttacatagtagttgacatattggataacaaagtatataaacataaagaggttatttatagtaacgtagaaaatgtgttaaataaatattcatctcaagtagatgtgtctgcttgtattgttggagaatacacaaaaaggttacaaaacaacaaatatgatgatattttacaaaaaatattatataatatgagtgctaagcaaatagatgaagttaaagacgtaaactttttatctataacagcatatagtaaagtattaaatgattatgaattagaatatttaggggaaaaaattaatttaaatataggaattaaatataatgaggatgacggaaaaacactcatatatattgccacaccaattataaaattagattattaattatgaggagatcaaaaaatatggctaagataatagtaaaaaagagtaatccacttaaaggtagtgttaaaatagatggtgcaaaaaatgcagttttaccaataatagcagcgactttattagcaaacggaaaatcaacattaaatggagtaccaaatttaagagatgttcatgttatatcagatttattaagacatgtaggagcagaagttgaatataaagaaaatacacttactgttgatgcaagcaatataaaaacttgtgaagctccatatgagcttgtaagaaagatgagagcttcttttttggttatgggaccattgcttgctagatttaatagtacgaaaatttctatgccaggaggatgtgctataggaacaagacctatagatttacatttaaaaggatttaaagccttaggtgcaaagatagaaatggaccatggttttgttgaagcagcaacagaaaagttagtaggaaataaattatatttagatttcccatctgttggagcaactgaaaacataatgatggcagcttctttagcagaagggactacaataatagagaatgcagcagaagagccagaaatagtagatttagcaaacttcttgaacgaaatgggagcagatgttaaaggtgcaggtactaatactataaaaataaaaggtgttaaagagttaaaaggagcagaacataatgtaattccagacagaatagaagcagcaacttatatggttgcagcagctatgacaaaaggtgatataactgttgaaaatgttttaatggagcatttaaaaccagttgtagctaaattaagagaagctggttgcgaaataacagaaatggacaattctgtaagagttgtaggtccaaaagtattaaaaccaatagatataaaaactttaccacatccaggatttcctacagatgttcaagcacaatttatggctatgcttactgtagccaatggaactggtgtagttatagaaactgtttttgaaaatagatttatgcatgttgctgaatttaatagaatgggtgctaatataaaaatagatggaagaagtgcggttgttaatggtgtagatgagctacacggtgcagcagtaaacgctactgatttaagagcgggggcagcccttattttatgcggtcttatagcagaaggagaaactcaaataggagaaatataccatatccaaagaggttatgttgatatagataagaagataacagcactaggtggtcaaatcgaaatagtagaagattaataattggtttatagaagaaagttataaattaatagggttgttcatatacttaaatacaaggttttaaaagctaaggaggagagtatatgaagaacccattggttgttttgttaggatttgtgacttgctctgtgttagttccatcacttataactttagtttcttataaaaatgtagaattaactgaaaaaccagagagcccagtatctataaacaaaactattaaaaaaagtgatattgaagacaaaggtaataaagaagaaaaaagtacagtgagctatgaaactgtaaataaaaaagcaccaattatcaatgtatataatcatataacagggaaaaccgaaaagatggacatggagaactatttatgtggagtactagctggtgagatgtcttcagagtttgatatagaagctttaaaagctcaatctgtagcagctagaacatatgtagtatataaacaggaacatggtaaatctagtaaacataaaaatgcagtagtatgtactgattataaacattgtcaagaatataagagttatgatactcttaaaaaattaaatggtgaagaatggattaagaataaatattccaaaatccaagaagcagttagaggaactaaaggtcaaataataacttataatgataaggcgatacttcctctttatttttctacatcttcaggaaaaacagaaaatagtgaagaagtattttctgcaaaatatccttatttaaagtctgtggaaagtccttatgataagtattcccctaaatttgcgtcaacacttaaaataagtaacacagattttgttaaaagtcttagaagggcatatagcactattgtgatagatgtgaataatttaagtaaacaagtttcaataactaaaagaagtgatgccggaactgtagaaaaaataaaattaggaaataaagaattgactggaaaagacattagaactgtttttaaattgaactctgcaaactttgacataaaatttggagaaggatacatagatttcgtggtaaaaggatatggtcatggtgttggtatgagccagtggggagcagaaggaatggcagaagagggctataaatattatgatatattatcacattactacacagatacaaaaataaaagatatatactaataattgtataaaatgccaaaaacacgtcaataatccaaatgtagaaatatatttggaggtgcaaaatgaagaaaaagctgttagaaaaagatggtttttatttatctttgtttgtatgtgtttgtttattagcagtaggtggagtttggtttacaaataataatgtagataaattggcttctaataaaggaattatggaaaatgctaataaagatagtgaagaggaaatacatttaattgaaaaagacaagaaagatgctatccctactgcaacggattcaaaacaaaacttagaaaaagctaagtcaaaagaggaaaataaatcgagtacaacaaaattaaattacattggagataaagtaataagaggatattcagaaaaagaacctagttattctaaaactcttgatgtttgggaaactcataaaggtgtagatattagttgtactaaaggcaaagaagtaaaatctctattaaacggaatagtagtagatgtatttaatgatgaagaatatgggcaatcagtcaaaataaaaagtgacaataacattgtagtagtatattcaaatctagataaaaatgttagtgttaagaaagaacagaaggtaacagaaggacaatctctaggtactgtaggtagtacttctcaaatagaaagtgaagaaggtatacatgttcatttagaggcgtatagtggagaaaaatctatagacccaatgagtctaattaagtaaaagtataacaagtttaatcatatttggttaagcttgttatattttttggtgtttttacatatatatcattaaagctattatgtgaggggggtaatctttgagatctcatatagaggaaagggccatagtggtagcaaaatatatacttgaaaaaaacactacagtaagacaaaccgccaagacatttggagtaagtaaaagtacaattcataaggatgttacagaaagattgaaggaaataaatccatcccttgccaaagaagttaaaaatgtgctggacaaaaataaatcagagagacatattagagggggattagcaacgaaattaaaatatgagaaggaacataaaaaaatgtaggttaaaaacctactttttttattgaattaaattataaaaagaaatatattaagtaattataaatagcaaaataataatactctcaaaagatttattttctcttgattaaagcgagatttttgtatatgctttattataggagtattaaaataggcttataatataatctaatattataaataaaggagttgaaaaaatggctggagctgatataggcatagatttaggtactgcaaatgtgcttgtttatgttagtggtaagggaatcgttttagaagaaccatctgttgtggcgatagacaaaagaacagattctgttttagctgtgggagaagaagctaaaaagatgatagggagaacaccaggtaatatagtcgctataagacctttaagagatggtgtaatttcagattatgatgtaactgagaagatgttaaaatcttttatagataagatagttgataaaaagggatttggaagattttttatgccaagaattatggtatgtgtaccaacaggtgtcacagaagtggaaaaaagagcagtagaagatgctacgagacaagctggagctagagaagtatatatcatagaagaaccaatagcagctgccataggagctggtgtagacatatcacagcctaatggtaatatgattatagatattggtggaggtactgtagatatagctgtaatatctctaggaggagctgttgtaagtgaatctataaaggttggtggagatagatttgatgatgctatagttaaatatatgaaaaaacaacacaatcttcttataggagaaagaacagcagagaaaatcaagtttgaaataggttctgcatttaagagagaagaagaaaaatatatgaagataacaggaagaaatttaattacaggacttcctagttctataactataaattcaacagaaatgttggaagcacttagagaatgtgttgagcaaatagtagttgctactcatgctgttttggaaaaaacgcctcctgagttagcagcagatataggagatgtcggtataataatgactggaggaggttcattattatatggattagataaaataatagaacagaggacaggaataactgttacaatagcagatgaaccattatcttgtgttgcaaaaggtacaggaatagctttaggttcaatagacttacttgaaactggtgggtctttcaaaagaaaataattaggagagtttagaatgttaaatatagatgaaataaaaaaattaataccacatagatatccatttttattagtagacaagattacagagctagaagttgggaaaagagctgttggtataaagaatgtaacagttaatgaaccatttttccaaggtcactttccagaatatcctttgatgccaggagtactaatagtagaagctctagcacaagtatgtggagtggcaatgatgtctgtagaggaaaacaaaggaaaactaggtgtatttgcaggtatagataaagttagaatcaagagagaagtaagaccaggagatacattaactatggaaattgaaatgacaactcttagaaaaaatatagctaaggcagatgctaaggcatatgtaggtgaagaacttgtctgtaaaggtgaattaatgtttgctttagtagaaaaataaaaacttgaaatataaaagtaaaaaggtagataatttggagtatttaatcagatactctaaaatatctacctttttatataaagaattttatcatttagtttatatttagattaggtggatactaataaagccaaggctattgtttcagctaaatctaatataaagctaaggcgtatattattaaatgaaagtttattattttcatcaattttatctacaattcctactatagaataatttcctatttgaggtagttttttaccaacaccttttccgggcaggataggtccttctctaatctgtatattacctatgttactctgcgaccccaagcaagcatctatagccaagaagttaccttgtatatgtgtattttttatagtatctaaagactcatatatatttaaggcgtgaatagggttatctagtgtaccgtaaacggggtatttaaagttactgttcttaagtattgttccaactaaagggcctaaagtatcacctatagccctgtctgttcctatgcaaacaacaatcgtattttcattaattatagtttttagaactgaacttagcatctgtataacatcatcatcgctgtagtttactttagctaaatacaataggaacacccccttcaaaaaaatatatgaataaaaagcattaaaaagacctaactttaaatttcagatagatagaaaattttatttgtcttacaaaaaaaggaatagaaaaaatatgactaaaaatattgacaaaattttaaaaaaatagtaagctagtaaagtaaaacaaaacttaaatcttgattaccttatcaagagaggctgagggataggccctgtgaagcccagcaaccacccaaatgggaaaaggtgctaattcctacaagacaaaagtcttgaaagatgaggtcagttaattagtatgtaattacgattattaacctcttcttataaaggagaggtttttttattttgagtaaatttctaaaattaaaaataaggtaaaacctataataaaaattaagaataaataagggggaataaaaatggcaagacatttatttacgtcagaatcagttacagaaggacatcctgataagatatgtgaccaaatatcagattcaatattagatgcattattagaaaaagacccacaatctagagtagcttgtgaaactacagttactactggtttagttttagtagcaggagaaataagtacatctgcttatgtagacattcctaaattagtaagagaaacagtaagagaaattggatatacaagagcaaaatatggatttgattgtgatacttgcgcagttataacttctattgatgaacaatctggagatatagctatgggagttgatgaaggtctagaaagtaagactggagaagagatagaagaagaaatagaaaaagttggagctggagaccaaggtataatgtttggatttgcatgtaatgagactccagaattaatgccacttccgatatctttggcacataaattatcaagaaggcttacagaagttagaaaaacaggtttagttgattatttaagaccagatggaaaaactcaagttactgttgaatatgaaggaagtaaagctgtaagagtacatacagttcttatatcagctcaacattgtgaaacagtatcaaatgataaaataagagaagatttaattaatcatgttattaaggaagttataccagcagaattacttgatgaagagactaaaatttatataaatccaacaggaagattcgttataggaggaccacaaggagatacaggtcttacaggaagaaaaataataatagatacttatggtggatattctagacatggtggaggagctttctcaggaaaagaccctacaaaagttgatagatctgctgcttatgcagctagatatgttgcaaaaaatattgttgcggctggtcttgcagacaaatgtgagatagaacttgcatatgctataggtatagctagaccattatctatatttatagatacttttgggacaggcaaggtttcagaagaaaaacttgttgaattagtaaataaacactttgatttaagaccgggagcgataataagagacttagatttaagaaagcctctttataaaaaggttgctgcttatggtcactttggtagaactgatatagatttaccttgggaaagaactgacaaggttgagcagttaagaaaagatgctttaggtgaataatttttaactaaaaagctgttagaatgtaattttacgattactttctaacagtttttttattatgagttaaatatttttaataaatgttaatttatcatcatataatgaataaacagtatttaatctggtcaatacattttatataatactctactaaatttatacatattatgggatatatgttaaaggatggttaagaatgtgttaactaatgttaaataattaaaaatatattgaaatatcacaataatgagtctaatataatcttaataaacttacactttaaaaataattttaattgggggggagtagtgtatgtcaggcaaagtaaatattaaaacggttataagttttgctggagcttatgttgctactgtaataggttctggatttgcaactggtcaagaaatactgcaattttttacgttttatggatatgcgggtattataggtggaataatctctatggtactattttcatggtttggagcagaagttatagataagggaagagaattgaaacttaaggagccaataaaaatttatcaagtatattgtggaaaatatcttggaacattttttgaatggtttggtccattgtttttatttggaacattagtaataatgattgcaggagcaggagctacactatcagagtactatggattaaatccatatgtaggtaggattggtatggcaatcgtttccctaataactgtttcattaggtttgacaaggctttctaaaatactaggtaatataggacctataataataatatttacacttttagtaggagcaattagtttatttagcaatattgatgctttatcaaatgctggaaatatggttgatagtttaaatattaaaactgctacatcaaatggatatttctcgggagtactttatacttgttacaatgtaataatagtaataacattcttgacaggaatgggagcttctgcagtaaataagaaagatgctgtatggggtggtatagtaggtggagtagcacttatggcagcagctataatgatgaatttggcattactttcaaacataggaaatatatacacaaaagagataccagcactttacttagctgataagatatctccaataataggtattttattctcagtagtacttttactaggaatatacactacagctgtaccattgttatggtcagtaactaaccgatttgtagaagatgaccaccctaaatttaaaattataacaatagtggtaagtatattagcttgtataggaggtttactgccatttgataagttagtaggtacactatatccatatacaggttacatgggaattttaattttactatgtatgctttatagaagaattactaaaactgaggggtacaaggagaataaatctgaaataagttagtactgtaatatacttatggaatttaatttatactctaaatatagagtaattaaaataaaatagctatttaaatatggtacctgtatttcatggtaccatattttatggatgcagattttttttgtttctgataaaatgtataatagttggaaattacgttaagtataaaaatataaaacttttctacgattatcatagttttaatatataaaattatactaacatttaaatggagcgattattagtatttttaggagataaaaatggaaaaattagaaggaatgataagtgaaatagtctttaaaaacgaagataatggttatacaatagctcacctggtaaatgaaaatgatgaaattgtggttgtaggatgtatgcctactttggcaattggagaaagcatagaagttgaaggaaagtgggtaaatcataagatttatgggactcaatttgaagtgaatagttttatgccagtaacgccatcatccttagaaggaatttatgtttacttatcttctggaatgatacatggtattggtgaaaaaatggcaaaaagaataattgataagtttggtgtagatacgttagaggtgatacaaaattcaccagaaaaattacaagaagtagaaggtatagggagtaaaaaagtaaaacaaatagtaaaaagttatgaagaagacagagaattgagaaatataataatacagctatctccttttggaataacaccaaattactgcctaaaaatatataaaaaatataaaagcagtgcaatagaagttataaataaaaacccataccaacttgctgaagatataagaggaattggatttaaagtagctgatagtatagcaagtaaaattggtatagataaaaactctaaagatagaatttgtcagggaatcttatacactttaaataaatctttaagtaatgggcatacatatttaccagagcatgttctaatacaagattcggaaaaattattggagctaaatggagaaataataaaagagtgtgtaatgatgctagtttataatcaaaaaatacatatagagaaagtaaacaatgaaaatcttatataccttatgccatactatttagctgaaaatggagtatgtagtcaaatagtaaaattatcacagtatgaatttgaagacttaaaaatagatatagataacgagattaatgttttagaagaagataagaaaattaagttagcagaaaaacaaattttagcagtcaaagaatctgttaatagtggagtattaattataactggtggaccaggaactggtaaaacaactaccattaatgctatcatagatatatttgaaaataatggtaaaagtgtgactttggcagctccaacgggaagagcagcaaagagaatgagtgaaacttctaataaagaagcaaaaactatacataggttgctagaaatgggattttcaacagatgatgatttaactttttttaaggatgaagaagacccaataaattcagatgtaataattgttgatgaggtatcaatggtagacattatcttaatgtacaatttacttagagctataaagttaggaacaagagtaattttagttggagatagtgaccaattaccttctgtaggtgctggaaatgtacttaaggatatgattaattctaatattataaatgtagttaaattaaatgaaatatttagacaagcgcaagaaagtatgataattgtaaatgcccataagataaacaatggagaaccactttatctaaatacaaaaggtaaagatttcttttttataagaaaatcaactaatgaagaaattttaaatgaaataataggattggttaatgaaagattacctaaattttataaagttgataaattaaaagatatacaagttttatcttcaatgagaaaaggtgaattgggagttactaatctcaatatagagttacagaagtatcttaacaaaaaagaaaaatttaaagttgaagaaagtttttctaaaagattatttagagttggcgataaggtaatgcaagtaaaaaataattatacaaaaaaatgggaaacagaagaccaaaaagaaagtggagaaggtatctataatggagatataggatatgtttatcacatagataaagataagaaaactatttatatattatttgaccagactaaaattgtatcatacctatatgatgaattagatgaaattgaccatagtttttgtacaacaatacataaaagccagggaagtgaatttccagttgtagtattgccaatagcgtgggctcctcctatgttacttagccgtaatttattatatacagcagtaacaagagcaaaaaaattagttgtattagttggagatgtgaaatatcttgaatatatgataaaaaataatagagttaatcaaaggtattcaaatttaggatataagctaaataaatttaaacaagaagggttgttgatagaataaatatgaaaatatgcaatgataattttattaagaattttaaaaatatgattaataaatgtttggattttatatatcctgagaatataagttgcataatttgtgataaatccataaagaaaacaaatacttattcaatatgtaaaagttgttttaaagaaatgaattttatacaagatggttgcatgaagtgtggaaaaccaataatacgtcattcaattgaaaaagaatttattgaagagtgtagttattgttttaataaagacttttattttgataaatcaatatcttgtattgaatataatgatgtgacaaaaaagatggtgttagggctgaagtataaccaaaaaacctttatggctaagtatatagctcaaataatgaaagaaaaattatatttagaaaacataaaatttgattatatattatttgttccacttcataaaaaaaggctaaataaaagaggttttaatcaggcacaaaaaatagcatttaatttaagtaaaatagtaaatattccattattagattgcataagtagaaaaaaatatacaagaatgctatataaattgaataagaaagaacgaaaagaagaattaaaaaatgtatttgttgttaaagaaaatgttaaattaataaataataaaaatatacttttaatagatgacatatttactactggtctaacaacaaacgaaatctctaaacttttaaagttatcaggtgctaataaggtttttgtattgactctacttacaaaagcaaatgataattatattatggaataatcttatatattgacaattttagtttaaaatattaaaatgaataagtgatatttaggtctgtggttgaaagtccaagccagtcgcaggcaaagggatccacgtaagttaacactaaaaattgggttaatgatcatggtgcggcttagaagtaagacctaccgataataaaatcgagagagagtagtagtgcggcgaacccaagcgaaccctccagtaggcgagtgtggggtcaaaaaccaggtcagctaaatatcatattaaaagagagctagcatacctttatgtatagctcttttttatatataataaatttaggttgagtcataaagaggtgatatgtttgaataaaagacaagaaaatttattaacaacattgctattaaaagaagagtttataaatgttaataagattgccaatgattttgagtgttcagaaaggacaataaggaatgattgcaaatatattgatgaatggttatctactttttgtaatgcttatatcaaaagaaaacctaatattggaattaaatttagtggagatggaacagacaaaatactggtaaatcagaagttgcgaggtgaagttaaaagagtaaatagtgagcttcataagcaagttgagatattaaatttactactttgtaataataaaaaagttactttaaatgatttatctaataagttgtacataaataaaaatattgtcagagaagaaataagtaaattatcagtagcattaaataattataatttaaatgtctcgactaaaaaaggcagtggtatatatattgaaggggatgagaaagacataagaataatgttagtatcattcttatttaaatacatagataaatacagattaaacatagatgaaatagagtacttccatatagtagatataataattgtaaaaaacataatgcttactatagaggaggatatggatataagacttacagatatatcattcaagcaattgatgctatttttgcttataaatataatacgaataaggctgggaaattctttaaaagtatcaaatactaagaaagagcttaagctaaaaatgcttatattggatatagaagatgaattgaaatctaatttatccatagtattaaattatgaagaaaaattgtttatagaatctttaatattgggtatgaacaaacaaataaatagtaataatattaagaaatctttatatctaaatgaagaattagcaagttatacaaaaaaaattataaatttagtatcagaagaatcaggaataaattttaataatgatatattactttatgaacaattaatatgtcatttgaatgttacaatgcatcaaatgaaaagcaatgtttacttagaaaatccacttttagataacataaaaactaaattttgttttttatttacagtaatatcaagttcaatagaaattgaattaaaaggaaaacaaataacggaagatgaaattggttatcttacacttcactttcaaacctctctagaaagaaaatacagcaaaagggaatcaaataaaaaggcaagtattgtatgtccatttagttttggagtaagtatgctattaaaagtaaagatagaaaagagatttgataacataaaaattattgaaacattaagagaggaagatttaaaaagagataactttaataagactatagattttataattgcatttcaagagtatgaaaatatccaaaaaccaatttttataacaacaccattatttactgatgaggatgagaataaacttaaagagtttacaaacaaaataaaagaaaaagacacctcatataaacttatgaacagattaatgatgtctgattatttaataagagagttagaacatgatgatatttatgaagctataacatatttaactaatttattaattgaaaaacattatgcagaaaaagagtatttacaatctattataacaagagaaaagtcatatccaaccaatgttggaaaaggaatattattccctcatggagacatgaaatatataaaacaatctgttttatgttttgcaaggttaaaaacaccaataaaaattagaaatggaaaggatataaagattatacttttattagcatataaaaaagatgatgatagaaaagtatttagagaattatttaaagaaatatctaatttaacagaggatgaaaatatgctagatattctaagtaaatgtgacattgaaaaggtaaaagatattcttatataaaattcataatgaactatggataagcacaaaattttccatgtgatggaaaaagttgtgcatgtttttttgtttttataagatattatatgtttgtaaggtataaataatctaaaagtagagaagcaatttaggaggaaaaaatggaagaaatagttttaaagattataattcatgctggaaatgcaaaatctatgctttatgaagcacttgactatgcaaaggaaaacgattttaaaaaagcagatgaattaattgaaaatgcaaatgaagaaattttaaaagcacataaagtacaaactgaacttatacaaaaggaagctgggggagataaatcagatatatctattttattgattcactctcaagaccatttaatgacttgtatgagtgagagaaaccttataaaagaaatgattatgttaagaaaagaaattcaaaaattaaaataaaaaaattaagggggatttaaaagaatgaaaagaaaagtatatttattttgtagctttggtatgtcaacaagtttacttgcagataaaatgcagaaggtagcagatgaacacaatttaccaatagaagtagaggcatttccgatagcagaaattgacaaaatagttgaagaaaaaaatccagattgtatattattaggaccacaagttaaatacatgctaaaggagttaaaaccaaagtttgaagctcaaggaaaacttatagatataatcaatgaagttgattatggaactatgaatggggaaaaagtattaaaacttgctataaagctaataaaatctaaacaagcgtagaattatagtaaaaaataataggaaatgagggtggatagatgaatagattggaaagaatacttatgccattggctgaaaaaataggtaaaaataaattattaattgcaattagagatggttttttaatatcatcaccattattaataataggttcattatttttattagtagcaaattttcctataaaaggatggaatgaatttgtaggtcaaatttttggtccagattgggctgtaaaattgcaacaaccaactgtagcaacatttgaagtaatgactttacttgcagttttaggaattggatattcttatgcaaagcaaatagatgtagatccaatagcatcagctgcagttgcaatagttgccttttttatagtaacaccgtttgtaataccatatacaccagaaggaacagaatcagtctacatggtaacaggtataccactaggttggatgggctctaagggaatgtttgtaggtatgataacagcaataacctctgtaaaattatttgctgcagttgtaaaaaaaggatggacattgaaaatgccagatggagttcctccaaccgtatcaaaatcatttgcagcattaataccaagtgcaatagttatggtagttttctttttagttaagatagcttttgaagctacaccatatggaagtatacatgaatttatatttaagtttttacaaatgccattattaaaattaggaaatagtttaggtgctatggcaatcgcttatatattcttacatttattctggttctttggaataaatggaagtagtgttgttggggctgtgtataatccaatattaaaaattctatcagctgaaaacttagctgcttttcaggctggttcaaaaataccaaacataataacaggtcaattccaagatatgtttgcgacatttggtggagcaggtagtacactatcattagtcatagctatgttattaatatgtaaaagtaaacgtataaagtcaatgggaaaactatcaattttaccaggaatatttggtataaatgagccattgatatttggtctaccaataatgcttaacccaatactattgataccatttgcaatagttccaacaataaatataataatagcttacttctgtatgtcagcaggattagtgcctcttacaaatggagttcagttaccgtggacaactccaattatattctctggttttttaacaacaggatggcaaggtgcagtcttacaattagtgcttcttatactaggaatatttatgtatataccatttataaaaatgctagataagcaatacttgagagaagaaaatgaaactgttgaagaggaagatgatgatatatcttttgatgatttagtattataggaggaagattatgaagaaaatagttatgatattggatcaaatacaagctggagctggaggaaaagagaaaagtaatatacctcctgctggaaaatcaagcccattaggaccaggtgtaatgatggagcaatttttaaatgaatctaaggtaatagctaccttattttgtggggatgaattttttgtaaataatgaaaaagaagtaacgagtaagatgatagctatggtaaaaaaattaaaccctgatgtagtaatctgtggaccaagctttaattacgaaaacttttctaagatgtcagcaatactgtctaaaaatataaatgataaaacagatataccagcttttgcagctatgtcagaagaaaatatagatgtgataaacgaatataaaaatgacatatgtatagttaagactcccaaaaaaggtggaattggtcttaatgattcattaaataacatatgtaaattggcaaaagcaatagcgaataaagaagatataactttgatgaaagaagaattttgttattaataagagtattaattattagcaagtttaaatattatactatttataataagcatacattagtaaaatctatataatttaaggaggggaattttaacatgtggggaatgatagcgacatggagaatggccctagaaggaataactgaggcatcagaacatttagaaaaaggcatggaagcaggtgatgctgtagagcttgctgtaagaagagttgaagactatccattctataaatcggttggatatggtggacttccaaatgaaaattgtgaggtagaacttgacgctgcatttatggatggtaacacattagatattggcgcagttgctggtataagagattattctaatcctgtcagcatagctaggaagttaagttatgagaaggtaaataattttttagttggaataggtgctgaagattatgctcataaaaatggatttgaaagaaaaaatatgttgactgatagagcgaagttacattataaaaagagaaaaaaagagactttagacaaaggattaagcccatatgctggtcatgatactgttggtatgatatctttagacaaaactggaaaaatgtgtgcagctacatcaacaagtggattgtttatgaagaaaagaggtagaataggagattctgcactatctggttcaggattctatgttgatagtagtataggaggagctacagctactggtttgggagaagatttaatgaagggatgtatatcttatgagatagttaggcttatgaaagaaggaaagcatccacaagaagcatgtgatattgcagtaaatgaacttgataaacagcttatcaaaagaagaggaaaagctggtgatttatcattagttgccatgaataataaaggtgaatggggagtagctacaaatatagttgatttcactttttcagtagtaactaaagaagaatctcctgctgtatatatttcaaatagagtagatggaaagactatacataaggttatatcaaatgagtggatggaagcatatgaggctagaataaaagcaccgatagaagtaagtgagtaaagtagtgttacataattaaaatagagttttataataaggagatttttatgaatatcataagtaataaaatagatgagttaaaagaagatttattaagtgatattatagatattgtaaaaatacctagtgtcaaaggggagtcagaaaatggcttcccttttggcgaaaaagtaggggaggcacttaataaagcattagaaatatcaaaaaaattgggatttaaggttagaaacttggataattatattggttatgcagagcatggagatagtgatgattatgtttgtgtaattggacatgtagatgttgtacatgaaggagatggttggaagcatcagccttataagggagaagaaactaatggaagaatttatggacgaggagtactagacaataaaggacctataatgtctgccttatatggattatatgctattaaagaattaaacttaaaattagataagagagttagaataatatttggtacaaatgaagaaagtggatttgaagatataccatattatttagaaaaagaaaaaacacctattatgggatttacaccagattgtaaatatcctgttgtatatggtgaaaaaggcatggcaaagattagaataaaaagtaaaatcaattatgaagaagatgtatacctaggttttatagaaaatatgtctgaaaatgtgcttgttacatataaagagctgaatatagaaaatagtaatactatattagatataaaggtaaaatacgattttagttataaattgaaagatgtattagatgaaataaaagctagttttccaaatagtatcgatatagaggtaatttctaattttaatcctgtatattttgataaagagagtaatcttgttaaaaagcttcagctagcttatgaaagggttacatcattagatggaactcccgtgacaactaatggaggtacgtatgcaaaagtaatgccaaatatagttccgtttggaccttcatttccaggacaaaaaggaatagctcataatcctgatgaatacatggatatagaagatataatattaaatgcaaagatatttgcaaatgcaatatatgaattagcaaaggagtagttatgttagaaataataggaatgtcagtagaagacgctaaaattatagaagattgtggtgcagatagaatagagttagttagtgctttaactgaaggtggattgacaccaagttttggtcttatagaaagtgttgttaacagtgtaaagatacctgtgaacgtaatgataagacatcatgcgaaaagttttgtatacagtaaagaagatataagtataatgcaaaaagatataggtgtggttaaagagattggtgctaatggagttgtatttggtgtattggataaaaacaataatatagatgagaaaaatctaaatgttttattgaaatgttgtgataatcttgatgttacatttcatagagccatagatgaatcaaatacaatagatagtgttaaaattttgaaggattatgataaaattacgaatatattaacatcaggagggaaaggaagtatagttgataacatacaaatgataaagaatatgatgcttagttctaatcacataaaaattcttttaggaggaggtcttaattttaataatatagaaaagataaaggaattaactaaagcaagtaattttcattttggtacagcgattagaataaataacagtccttttgaagatatagatagacaaaagcttaaacaactcgtaaatataatttcaagatagtatatgaatataaaatacttagtttaaataaagagagtaagttaattataatttgggtatatgaatgttaataggtattaaatatgaaattattgttgagtatgctttataacttttaagtagttttaaatataaataatgaaagaaaagatagattatggaggttttagagggtttatagttattaaaaaattataaaggtatattggcatataatacacataatttcctaaaattaccatcttatgacatgaattcacatattaataaacaattaatggagatttttgtggatagaaataggagtaaaaatagctttaaataaacaaaaacaagagttattaacagttttatccacattatccacaggtgtttgtaataatattaatccacataagtatcaatgtaactaaaaatgataaataattctatcaattgaatagaaaaaatcataaaagtaaataataaaaagaggattatgagagttcgtgtagaatatattattaaagtataaattttcttatactgacataattgaagggagatgtatttatgaacataattatatctggaaaacaaatcgaattaactgatgcaataaaaaataaaatcgaaactaaactaagtaagttagataattacattcatccagacactgatgtaaaagttacagtaagtgcgagaaaagcaagacaaaaaatagaagtaacaatagctactgtaaatggtcctataattagagcagaagatatgcaggaaaatttatacacagctatagatgttgtatatgataaattaagtaaacaattaaaaaaatataaaaagagattacaagataaacataaagacaacaagagtataagattccaagattcagagataaatctagctgatgaacaagaggattatggggatgaaaatcaagaattagtaattcaaagacgtaagaaatttagtgttaagccaatgagtgaagaagaagctgtattacagatggaattaataggacatgatttttatatgttcaagaacatagattcagatgaaatagcagtagtttataagcgtaataatggtggatatggtataatagaacatgaataaagcaatttagatttaatcatattagctatcgataaataaattatcgatagctttttaaattaatattaaaagtatagtttttatggtaaaatgaataatagtacaataaagaacgaggagagatgtaaaatatgagctttatggataatttattcaacatggcagataaaaaagaattaaaaaagttcaataaaactgttgatataatagattcattagaacctaaatttgaatctatggcagactcggaacttaaaaatatgacaaatatatttaaagaaagattagcaaatggtgaaagtatagatgatatacttccagaagcttttgcagtagttagagaagtttctaagagagtgttaggacttagacactacagagttcaaatgattggaggtatagtactacatcaaggaagaatagcagaaatgaaaacaggtgaaggtaaaactttggttgcaactgctcctgtttatttgaatgcgcttactggaaaaggtgtacatgttgtaacagtaaatgattaccttgcaaaacgtgatagagaccaaatggcaaaaatctatgagtttttaggaatgagtgtaggcgttattatacacggtcaaaatccaaaagttagaaaagaacaatatgattgtgatataacttatggtacaaataatgaatatggatttgactatctaaaggacaatatggtaatacacaaagagcaaagagttcaaagaggattaaattatgctatagtggatgaggttgactctatactaatagatgaggctagaacaccacttatcatatctggacctggagacaaatcaactcacttatattcagatgcaaacacatttgttttaaccttaaaaccagatgattatgaattagaagaaaaagataaggctgtatctctaacagcatcgggtatacaaaaagcagaagtgtattttaatgttgataatataacagatatatctcatacagaattataccatcatataaatcaagctttaagagcacatgtaataatgaagaaagatgttgattatgttgctaaagatggagaaatagtaatagtagatgagtttacaggtagacttatgtttggtagaagatattcagaaggtttacatcaagcaatagaggctaaagaaggtcttaaaatacaaagagaatctaaaacactagctactgtaacattccaaaactactttagaatgtataaaaaactttctggtatgactggtacagcaaaaacagaagaagaagagtttaaagcaatttataaaatggacgttttccaagtacctaccaataagcttatggtaagagaagatttaccagattctgtatacaaaagtgaaataggtaaatttaatgctgtagcacaagaaataattgaaagacataaagttaatcagccaatacttgtaggtacagtatcgatagaaaaatcagaattattatcacaaatattaaagaaaaaaggcattaaacatgaagtattaaatgctaagcatcatgataaagaggcagagataatagcacaggctggtagattaggcgctgttacaatagctacaaatatggctggccgtggtacagatatagttttaggtggaaacccagatttcttaactaagagagaaatgagaagaaatggatttaaagaggaaatagtaaatagggtagatactccaatagaaggtatacctgtaaaaggtaatgaaattctatttgaagctagagaagagtatgaaaaactatttgaaaagtttaagcaacaaacacaagaagaacaaaaacaagttgtagaagcaggtggacttgctataataggtacagaaagacacgaatctcgaagaatagataaccagttgagaggtcgtgctggtcgtcaaggtgacccagggagttcaagattctatataggtcttgatgatgaccttatgagattgtttggtagtgatagaatatctggtattgtagataaaataggtcttgaagaagacatgccgatagaacatagaatattatctaagtctattgaaggagcacaaaagaaagtcgaaggtaaaaactttggaataagaaagcatgtacttcaatatgatgatgttatgaataaacaaagagaaataatatatgcagagagaaaacgtgtattagaaggtgaagatttacaagaacaaatacaatcaatgactcattctataatagaagaagcagttactctttatacacaagataaaggatttgatgaagaaggattcaaagaacatatgtataatctgttcttgccaaaaggtagcatagaaataccagaaatagaaaaacttaatccagttgaaataacagaaaaagtttatgaaatagctatgaagatatatacttcaaaagaagaacaagttggctatgagagaatgagagaagttgagagagtaatcttacttcaagctgttgataaccattggatagaccatatagatgctatggaccaattacgccaaggtattggtcttcgtgctgtaggtcagcaagacccagttattgcttataaaatggaaggttttgatatgtttgatgaaatgaataaacatatcaaagaagacactgtaagatatttatttaatataacaatagaaactccagtggaaagaaaagcagttgtagatgttgaaaatctatcttctccatcagatggaacacttccaacaagtaaaactgttaaaaaagatgaaaaggttggaagaaatgacttatgcccttgtggaagtggtaaaaaatataaaaactgttgtggaagataatctcggaggattaaatgttaaagttacaagagtatagacatagtatggagcagatggcttcaaatttagaagaattgagggtttctctttgacatagcttcattgatgaaaaatatacaaattaatgaagaaaagatgaatcaacaagacttttggaatgataatgaagtcgctcaaagagtacttcaagaaaataaatctttaaaagagacattagaagaatatgaaagcttaaaaagcttattagaagatatagaagtattaattgaaataggtttagaagaagatgatgattctgtagaaagagatatagaaaagtccatagaatcaatggaagaaaaattatctgaaatgaaaataaagactcttctaaatggagagtatgataaaaataatgctatattatctataaatgctggtactggtggcttagatgctcaagattgggctcaaatgcttttgagaatgtatataagatggtcagaaagtaagggttataaagttaagcttttagatataatatcagaccctgaagcagggataaagacagctacaattcttgtagaaggaacaaatgcttatgggtatttaaagagtgaaaaaggagttcatagattagtgagaatatctccatttgacccatcagggaaaagacatacttcatttgcatctatagatgtaacaccagagttagatgaaaatatagaagtagaaattaatccgtcagatttaaagatagacacatatagagcttctggagctggagggcaacatgtaaatactactgattcagcagttagaataacacatatccctactggtgtagtagttcagtgccaaaatgaaaggtctcagcatctaaataaggacagagctatgagacttttaatggcgaaattgatagaattaaaagagttagagcaaaaggaaaaaatagaagatatacaaggcaaatactcacaaataacttggggtagtcaaattaggtcatatgtttttcaaccatataaattggttaaggaccatagaacaaatgctgagtttggaaatgtagatagtgtaatgaatggaaatatagacttgtttattaatgaatacttaaaaatgaataaaatagtttaataaatatgcactgtaattaagatatatgtataagaaggttagtgcttaatatgcacttacagcacttaggctgaggacgataaccctcagccttcgttctgttttgttatacttatgaaaaactaacattaggagtgaataaattggatataaatcaaatcttaaaaaaagagtttaatcttagagatgaacaaataaataatacattaaaacttattgatgaaggaaatacaataccatttatagctagatatagaaaagaaatgactggcgaaatgagtgatgttacactaagagaattttatgaaaaattaatgtatttgagaaatcttcaaagtagaaaagatgatgtagttagactaatagatgaacaagggaaattaacagatgaaataacacaaaatatagaaaaagcaaaaacattacaagaagtagaagatatatatgctccatataaacaaaagaaaagaactagagcaacaatagcaaaagaaaaaggattagaaaatttagcattgtcaatactagagaataatttagataatatagaaatagaggcaaagaattatcttgatgaagagaaagaagttctttctattgaagatgctctaaaaggtgctagagatataattgcagaactagtctcagatgatgctaagattagaaagtatataagagaattagctttaagagaaggtatgatagttagcaaaagtgctactgatgagaaatcggtttatgatatgtattatgattataacgaagcagtaaaaagtatggctccacatagagttttggcaataaacagaggagaaaaagaaagcttcctaaaggttaagttagaaataaataatgataaagttttaaattacataataaacgaatatgtaaatgataaaaatttcaaaaataaagaagaaatcgtaagttcaatagaagattcttataaaagattaattttcccatcaatagaaagagaaataagaaatcatttaacagaaatagctcaagaaagagctataagtgtatttggaaagaatgttaaaagtttattgcttcaaccaccagttaaagacaaagtagttatgggatttgaccctgcatttagaactggatgtaaaatagctgtagtagataaaaatggtaaactactagattatacaacagtatatccaacagaccctcaaaatgatgtagagggagcaaagaaagttttaaaaggattgattgaaaaatacgatatagatataatttcaattggaaatggtactgcatctagagaatcagaaacttttgtatcagaaatgataaaagaaatagatagcgaagtgcagtatgtgatagttagtgaagcaggagcatctgtttattcagcatctgaacttgcaaatgaggaacatccagatataaatgtatcaataagaggagctatatctatagctagaagattacaagacccattagcagagcttgtaaaaatagaccctaaaagtattggtgttggtcaatatcagcatgatttaaacaaaaagagattagaagaagtgctagatggagttgttgaagattctgtaaatagtgttggagtagatttaaataccgcatcatactccctactagaacatgttgcaggaataagtaaagctatagcaaaaaatataatagcatatagagaagaaaatggagattttacatcaagagcacaattgaaaaaagtaaaaagactaggacctcaagcatttactcaatgtgctggatttatgagaatcttagagggtaaaaatccactagataatacaggtgtgcatcctgaaagttatgatatatgtaaaaaaatgattgagataattggatattctttagatgatgtaaagaataagaatataggtgaaatagatgaaaaaataaaagaaattggcttgagggaattaagtgaaaaactggaagtaggacaagttacgttaaaagatatcatagctgaaatcaaaaaaccaggaagagacccaagagaagaaggtataaaacctatacttagaactgatgtcttaaaaattgaagatatacaagagggtatgactttaaaaggtacaataagaaatgttgtagactttggtgcatttgtagatattggaataaaaaatgacggattagttcataaatcagaaatgagtaatagttttgtgaaagaccctatgagtattgttacagtaggtgatatagtagatgtaaaagtcattggaattgacttaaacaaaaaaagagttgccttatcaatgaaaaaatagataagtttatgtatggttatagtacttaaattctatatttgtaaatgagattactcgagtgtataaatgttaaaaatttgtaaaagtatatagtaagaaaatatattaaaataagaacgatagtcttgaaaatcaggaggaaaatgaatgatttttataaaaaatggtaaaataaataccataacaaatgggataattcatggagatatacttatagatgaaggaaaaataatagaaattggagaagatttgatagctcctttagatgtagaggtaatagatgctagtaataaacttgtgtttcctggatttatagatgctcatactcacttaggtttatgggaagatggtatagggtttgaaggagcagatggaaatgaagagactgacccaataacaccacaattaaatcctatagatggaattaatccaatggatagaacttttaaagaagcttttgaaggtggaataacttctgtttgtacaacccctggaagtgcaaatgttatgggtggtcaatgtatagctataaagacatgtggaaaaagaattgataaaatggtaataaaaaatccagttgcatctaaaattgcttttggagaaaatccaaagagctgttatggtcaggatgataaatctcctcaaactagaatggctatagctgctttacttagagaaaacctaaaaaaagcagaagaatatttagaggatattgatatgtatgagagtcatgatgatgaagactgtgaaaaacctgaatatgatataaaaatggaaagtttaataccagttttaagaagagaaattccttttaaggcacatgctcatagagcagatgatatgtttacagcaataagaattgcaaaagaatttaatttaaagcttacattagaccattgtacagaaggtcatcttattgtagatgaattagtggaagaagggtttcctgtaatagtagggccatctttgtcagaaaggtctaaatttgagcttagaaatttgacatttaatacagcaggaatactttcaaatgcaggtcttgatgtatgtataatgacagaccatccagtaataccagttcaatatcttccaatatgtgcaggtattgcagtaaaacatggtatgaaagaagaaaaagcaatagaatcaattacgataaatccagctaagactttaggaatagaagatagagtaggctctatagaagttggtaaagatgcagacctagtaatttgggataattctccactagagattcaaagtaatgtactttacactataataaatggcaaagtagtgtatgagaaaaaataacttgacaattattaaaaaattaactaatataagagtgtaaggaaaattaaaaaatcaaagaagatcttcggggcagggtgaaattccctaccggcggtatagcccgcgaactacttaggtggttgatttggtgagattccaaagccgacagtaaagtctggatgagagaagatatttatggaagataaataagtttattttagtttgtttaaactatatccataaaaactcgaagatagggtcttcgagttttttgtttttcctaaaaaatataaacatattgattagggggaaaataattatgcaaaacacagcaaaaagaggcaatatgatttcaacaagaactttagtagtaatgtcaattttatctgcaatatcttatttattaatgtttattcaagcaccaataccaggtatatttccagatttcttaaaaattgacttatcagatattccagcaatattcggaggaatgtctctaggaccattagttggatttggaatagttgtagtaaaaaatgtgttacaagcaataacagcaacaacaactggaggaataggagaatttgcaaatatattaattggtggttcttatgtaatgatactttgttattcatataagagaagtggagatttaaaaggtgtactgattggttttgtattaggaacaatatctatgactataattggttcattagtaaattattttgtaatgttgccactttatggtcaacttatgggactagatgctataataggtttaggttcagctataaatcctcaagttcatgatttattcacttttgtaatttggatgatagctccatttaatgtgctgaaggctgttataatatctttagtaacattgccactttataaaaaaatgggaaatataataaagaaataattagacaagaaaatataaaattaaatgtattgaatagccataatttatttataacttcagtcctatattgtgattgatatattaaatatattatggctttattaatttatcaaaaaatgtatataaaataagaaatatttagacaaatttaaattttaaaataaaggaagaattaaaacgattaactattaaaatatgaaaaaggtatctacaatatacagagcgaatttataataaacaaaaaataaagttattattaaaaaactataaagactaataatcaaacttttaataataactaatttaataatgataggggtgtatattcatgcatttatctaaaaaaataaaaaaattatttttagatgataaagggtattattttaatagtaattgggaagatattcatattggtatttatgatacaaaattaggagattctttaaagtatatcactaatgaatatattgaaaatatggaaagggtaaaatacgattatcgtgaattaaaaaatatagaaaatcaaactgatggtatgtgtattttagcaataaggcagaattacaaggcattagagtatgtaaaaaatcaaaccgaagaattatgtttagaggcaataaagtataattataaagcacttgaatatgtaaaagaacaaacagaatacttgtgtcttgaagctataaaaaaagattgtaatgcacttaagtatgtacgaaataaaacagaagggcttattataaaagcaataagtcattcttccaatatagatgttgtaagtatactaaaggctttagagactcaaacaagaaggatatgtttagaagcaattaaaaaagatggcaggtgtcttgcatacgttagagaacagagtgaagaattatgtatagaggccattaagcaaaattataaagcattaaaatatgtaaaaaatcaaacggaaaaaatgtgtatagaatccgtaagacaaaatggtatggcattacaatatgtaaataaacaaactgataaaatatgtatagaagctgtcaaacaagatggaagaagtctacaatttgtcaacaataagacagaagaaatatgtataaatgctataagatatttaaataaaaaatataatattaaagatgtactaagttacatagataagtatacagaagatatatgtatagagattgtaagacaaaatggaaaaatgcttatgtatataaaaaatcaaacagaaaaaatgtgtattgaagcagtaaaagagaactataagtctcttaagtatgtaaaagagcaatctgagagaatatgtaaagaagcattgaagcaaaaccataaagcaaaagagtatgtaaaaattgctattgatgattgtatataaggtgtagatacagccatcaatagtgaaagataaaaaaagataaagacaagtactttataataatctaggcttatactataattaattaagcagtgatataaattcacatgacgattatatcaaaatggagatgaattgatggcaaaaatatatttagaaaatgaaaataaaactagagaaataggatataaattaggtaaacttttaaaagaaggcagtgttatctgtttagtaggagatttaggagctggtaaaactacaatgacacaaagcttggcagattcattagggatagaagattatataacaagtcctacttttactataataaatgaatatgaaggaaaaatacctttgtatcattttgatgtttatagaataggtagtagtgatgaaatgtatgatattggttatgatgaatatgtaaattcaaatggaatctgtataatagaatgggctaatctaatagaagatatacttccaaaagaatatttgaatatagaattgagatataaagatgaaggaagagaaatgatattaactccaaaaggagagttttataaagagatagttgaggagttgattaaataatgaaaatactaggtatggatacgtcttctatggcagcaagtgtagcagttgttgaagatgataacttaatatgtgagtttacagtaaacaacaaaaaaactcattcacaaaagcttatgccaatgatagaaaatatgttgagtatgagtgatttaagtataaaagatatggatttattagctgtatgtataggtccaggttcgtttacaggacttagaataggtatggctacagtaaaagctatggcccatgtaaataatataccaataatagcagtaaattctttggaatctctagcaaataacataaatttctgtgatagaaagatatgttgtatattagatgcgcagaaaaatcaagtttattcagctaaatacaagtttgaaaatggagagatgatagaattagatggtgttgatgttgtagagtttgatgctttagtagatgaaattgtatcaactaatgaagaatttataatagttggagaagctgtatacaaatataaagacaagttagagaatataaaaaatataaaaataccttcaccagctaataatgtatctaacgcaggaagcttatgctctttagcattaaataaatataataaaaatatagatgtacatacttgttatacgataaatcctatgtatatcagaaaatctcaagctgaagtacaatatgatgaaaaaatgaagaggctaaataatggaagataatacaaaactaatagtagatgatataaaaatagaagaaatgactacagaagatatagatgaagtttttgaagtagaaaaaaattgttttgaagattattggtcaaaagagtcttttagaaaagagttgtctaatgaagtagcaaggtatatagtagctaagttaaatggaaaaattgtcggatatgtgggaatttggcttatacttgatgaagggcatataaataatgtggctgttcatagtgactatagagggaaaaaaataggggacaagttgataaaatgcatagttgatttatgtaaagataataatattgcatctatgacattagaagttagagcatcaaataaaatagcacaaaatttatatagaaaatatggatttaaaatgggtggaataagaaaagaatactacagtgataataaagaagatgcaattataatgtggaaccaattaaaagaggtgtagagtttatgagtgatataataacattagctatagagagtagttgtgacgaaacagctgcatcagttttaaaaaatggtagagaagtactttcaaacataatctctactcaaatcgagacacataaaaaatttggtggtgtagttccagaagtggcctcaagaaaacatgtggaaaatattgatatagttgttcaagaagctttagacaaagcaaatataggttttaatgatatagaccatatcgcagttacatatggacctgggctagtaggtgctttattggttggtctatcttatgctaaagcacttgcatatactttgaatattccacttgtaggagtaaatcatatagaagggcatctaagtgcaaactatatagagcataaggatttaaaacctccttttataacattaatagtatctggaggtcatactcacttggttgaagtaaaagattatggcaagtatgaaattttaggaaaaacaagagatgatgcatctggagaagcatttgataagatttcaagagctatgaatttaggctatccaggaggtcctattattgataatctggccaagaatggaaataaacatgctatagaatttccaagagcctatttagaagaagatagctatgattttagttttagtggattaaaatcttctgtattaaattatctaaatggaaaaagaatgaaaaatgaagaaatagtagttgaagatgtagcagcatctttccaagaggctgtagtagaggttttatctaataaagcactaaaagcagtaaaagacaaaggatacaatatcataactctttctggtggggttgcttctaattcggggcttagagctaaaataacagagcttgctaaagacaatggtattactgttaagtatcctcctctaattttatgcacagataatgcagctatgatagggtgtgcaggatattataattttataaatgggaaaacgcatgatatgagtttaaatgcagttccaaatttaaagataaatcagtagagttagatgaatttgtaaatataaaagtattgtttcaaaaaagtaagtagaagtgaaattaaatataataaaaataaatatagtatatattaaaacttgaagtaaaactatttataatctttatattccaatgaattgcaacaaattttaggatatacagattgtctttggcttagatttgcttcaagtttaattttttctatagaaagattattttaaaaagtgggtaatatacccttttttttcattcttaaaaagttttatactaattatagaaagattaaggaggggaagaaatgagtcaaagtaaagaagacaaaataagaagtattttggaagcaaaaaatattaaatcaaattttcaaaataaagaaaatttaagtgaatttaatgaaaaaaaagcaagtaaaagagcagaagacttattagatgtatattataatacattatctactgctgatatggaatttccatattggtataatagagaatatagaaaatcagatggtgatataccagtagttagaagagctaaagctcttaaagctgctttttcacatatgacaccaaatataatacctggtgagaaaatagtaatgcaaaagacacgccattatagaggttcttttccaatgccatgggtaagtgaaagtttctttgttgctcaaggagaacaaatgagagaagaggcaaagaaattagccagtaacacagctgatgaacttacaaaatttgggtctggtggaggaaatgttactgaaagttttggaaatgtcgtttcaatagctggtaaattcggaatgagaaaagaagaagtacctgtacttgtaaaaatggcaaaggaatgggttggaaagtctgttgaagatttaggttttcactatgaaaaaatgatgccagattatgatttaaaagaaaacctaatgagtacacttatatgcatgtttgattcagggtatacacttcctcaaggtagagaagttataaattatttttatcctttaaattatggattagatggaattatagaaatggcaaaagaatgtaaaaaggcagttgcaggaaatgcatctggagatgggcttattggtatggaccgtctatatttttatgaggctgttattcaagttattgaaggattacaaacttggattttaaattatgcaaaacatgcaaaatatttagaaagtatagagacagatttagaagctaaaaaagaatactcagatttagtggagatattagaacatattgcacataaacaacctcgtacatttagggaagctcttcagttgacttatacaattcatatagcatcagtaaatgaggatgctatatctggtatgtctataggacgttttggtcaaattttatatccttggtatgaacaagatatagaaaaaggactaattacaaaagaagaggttatcgaattattagagctttatagaataaaaatcacttgtattgactgttttgcttcagcgggcgtaaatggaggagtactatcaggtaatacatttaatactttatctataggtggattaaaagaagatggttctacaggagctaatgaactagaagagttattattagaagcaagtatgagatgtagaactcctcaacctagtttaactatgctatatgatgaaaagcttccagaagatttcttaatgaaagctgctgaatgtacaaagcttggttctggttatccagcctgggtaaacaactcaaatggaacaacatttatgatgaaacaatttgctgatgaaggtatgactgttgaagaagcaagagcatttgcattaggtggatgtttggaaacgtctccagggtgttggaaacagttaactttaaacggaaaaacgtactctattgcaggtggagcaggtcaatctgctggctctggagttcactttatagctaatcccaaaattttagaacttgttcttatgaatggtaaagaccatcgtatgaatatacaagtatttgagcctcataataagccattagatacttatgaagaagtcatagaagtatttaaagattattataaacaagcaataaatgttttagaaagagcaaataacattgagttagatatatggagaaaatttgatacttctataataaattcactactaaagccagactgtttagacaaaggtcaacatataggaaatatgggatatcgttataatgcaacattaaacgtagaaacttgtggtactgttactatggtcaattcatttgcagcacttaagaaacttgtatatgatgacaaagcatttacaatagaggaaatgaaggatgcaatattaaataattttggatttaaagatgcattagaagtaggaaattattctatggcagaccaagtaaaagtagataagactggtaaatatgatgctatttacaaggcctgtcttgatgcacctaaatatggaaataatgatttgtatgcagataatattcttaaaaactatgaggtatggttatcaaaagtatgtgaagaagcacaatctttatatgctaagaagatgtacccttgccaaatatctgtttctacacatggaccacagggagctgctaccttggctactccagatggtagactaagtggaacaacatattcagatggttcagtctctgcatatgcaggaacagataaaaatggagtatatgcattatttgaatctgcaactatttgggaccaagcagtagttcaaaattctcagatgaatttaaaacttcatccaactactataaaaggacaacaaggaactaaaaaattattagatttaacaagaagttatttaagaaaaggtgggttccatattcaatataatgttgtagattcagaaacattaaaagatgcacaaaaaaatcctgacaattatcgtcaattaatggtacgtgttgctgggtttactcaatattggtgtgaattaggtaaaccaatacaagatgaagtaattgctagaacagagtatgaaggggtgtaaaatatgagaaagcatagtgattgtatgaatttttgtgcagtagatgcaaccaaaggaatttgtagattatcaaaacaaatgattaatttagatgattcagcatgtccagagataaaagtaatgccaaaatgtaaaaattgtaaaaattttgttgaagctaatgatgaaggtataggcaaatgtgttggcctagagaaagaagactgggtatattcaacattgaatgcaattacttgtgaaggacatgtgtttaatgagtagtcaaaagcaattagaaggcatgattttcgatgtacaaagcttttcagttcatgatggtccaggttgtagaacaactgtatttttaaatggatgtccactgagttgtaaatggtgtgcaaatccagaaagttggactgtaagaccacatatgatgtttagtgaattatcttgtcaatatgaaaatggatgtactgtatgtcatggtaagtgtaaaaatggtgcattgagctttaatcttgataataagccagttatagattggaacatctgtaaggactgtgaaagttttgaatgcgtcaactcatgttattataatgcgtttaaattatgtgcaaaaccttatactgtagatgaacttgtgcaggtaattaaacgtgattctaacaattggagaagtaatggaggagtaacatttagtggaggtgagccactacttcagcatgaatttttacatgaagtattattaaagtgtcatgaggtaaatatacacactgccattgaaacaagtgcatgtgtatcaaatgaagtttttaataaaatatttaaagatattgattttgcatttattgatataaagcatatggatagagaaaaacacaaagaacaaacaggtgtatataatgatttaatattagaaaatatatcaaaccttgcaaattctgactggaatggaaggttagtacttagagtaccagttatctctgggtttaatgatagtgctgaaaatataagtgatattatatcttttatgcacaaaaataatttaatagagattaacttattaccatttcataggctaggagaatcaaagtggattcaattaggtaaggagtatgagtattctgataagggagatattgatgaagagcatcttgaagaattacaagatatatttttggataatggtatagcttgctatgttggtcatgagacagctttttaaaatcaaatacaagtttttttaattaaaaaaggatgttacactaaaagctagagttacatccttttttatgtggtttttatgtagaaataattaagtaaagttttatatgttttatatattgttcatattgctttatgtccataaatattactttaaatttatactttatatattttttatagtttaaattacagttagagaatatattacgtttactttattgaagcagaagttttgtggtaaaatactactatgaagaaatttaatagaatatattttagaaacaactaaaaataatagttaggaggaagacatctatatgaacaaatcatggagtaacttgattattaagaataaagacaaaaaagtacgttcagggtggattattataactgttatggctgccttttacatatttgagtattatttaagcactatacttatggaaataataagaaaaattctgattgctacaggtgacattaatttaaaaacaaactatttttcggaatatgctaattggttaaatgacgttgggttacaggttgtatttcaaattctaacagattcacttatgattattattcctataattgtatggagatttattatgaaaaatcctattagtgaaatgggattacattcttatagaattaagaaaaaagaaggatatgtaggaatgttattaggaatatttaattgtacagtaatctttattataacaataacaattggtggtggtcatgttacttcatgggtaccaaaaatttcacctttaacagtttcttggatacttgtctttattttagttgcttttgcagaagaaattttaaatcgtggtttttttatggcagttttacgaagatgtaaaaatatttattttataatgattgttccatctgttatttttgggttgattcatatatggaatcctgatgttacttttttgtctgtaattaatattataattattgggattcttttttcatatatgtttataaagtcgtcgaatatatggatgtgtataggttatcattttacatggaatgtatttcaggggattatatatggtatgcctgtaagtggacttcaggttccagggattataactacacaaatcactcatggtaatctattaaatggagggatgtttggtattgaaggtggaattttgactacttttgttaatctacttagctttatatttgtatggtattactatagagattctaagtatgattttgttagtgataaagtaaatgtgactaatatcaagaattagttgattataataaattttaataatatcttctaaacttaaagtattctgtaggattgttggaaatttacaaaaatataaaaataacttggatattctatttactccaagttatttttatattcttttgtaaatagaaatggaacataaaaaattaaaacaaccatagatactattagtatatcatggtaagtgatagttgattctttagaatttgtgataagaaaagcactattatttaaaacatgaattatagcacaaaaccagatattcttagtttttatataaagatatcctaaaaatattgaaattccaactatatgtattgaacgtaatattactcctaatattggcgcttcaggtgtatataatgtaaatattagtggtaagtgccacaagctccaacacatacctaatattatgactcctaattttttaccaaatttatcaaaaaaaatattctgtaaaaaacctctccaggcatattcttcactaaaaaaaatataaatagtagttaatgatgttattggagtaaatataaattttatgataccactataattaggttgagccccttgtagtattagtataaatgatgttggaacaattacagaaatcataaagtaaataattaataaagaacctagtttaatattttttacaggatataaattttttttatttgatgaatatattataattgataagctacttataaaagttaatattaggtttataattataaattcattattatttattagatttaataacttaagaacaattaataatgaataaataagaaaaaataatatgattagtgaataaaattcatacatatcattatttaatccttcagtataaaactttgcaatagcaactgaagatagaggtaatatcatcatgaatgatgcaaagttttctggatcaataaatttattataatataacagtaaacctaatgaataagttaaaccaaagtttataaagaaaaagataataatttgtattttttttctttttatttcatttttaataaatactgggtttagaatatttatccatattaattttaagttcattaatttaatactcctttacaatatagattcttaactaaattaaaatattttattgaatattataaattcatgacagtcaatattattgaaaagtaacttataaaattatatataaataataaaattaattttactatatacccatatatttagttatattgcaggcagaatgtggtttaccataagcaaaaggacaataaaaaatatttttctatatttttattatctttttgtaaaagatttattatttattgcattaaattaataggcagtagaggcatagttgataaaattaatgaagaaattaaacttatgaatataaatttattattgagttttaatattacatttattattctctttgattttaatattgtatatttaataattattacattcgtctggttaataaataataattaaataaatcaaatgattttaatttactatatgattataatataacgttgattttttatgatttcaataatttcctatatacaaaataatacaaaaaatttattaaaaagttagtttattattttatttataaaaattaggatgaatttgtaatgttaatatcaaaaaaataaatataaatatcaaaaataaatttatttaaaattaaaattttatttattattaaagagtaaatataattattagtaatatatatagtatttgtaataaaatatcaataattagaaagattatgaaaactaaattagaagaactaaaaactatatttttattaattataatatttgaataatctttttaatcatataaaatgcatatacttgtaatatttaaaggtgatattaatattattagtgtatattaatattcccttgaaattaaaaaaacatagatatttcagtaatctaaaatagtctacaaaaataacagttttagcaaaattaataagaatacatatagatttaaacctaaaagtatgaacatgtctgttttttacaagattaaaatttatattatatgataaaattaacttaactatttcaataagacttataatttttttctttatactagaccttattgaaacctttatagtttaattctaattatatattataaataaagtatgtgtatattaaggaggtaatatgaagtttttaaatgttttaatagtagttgaagatattgagaaatcaaaaaagttttattatgatattttggggttaaaggtaatctgtgattttggagaaaatgttgtattagaaggtaatatatcattacaagaaaaaaagctttggttagaatttattaataagagtgacagtgaagttaagttcaatggaaatgatgctgagttatattttgaggaagataattttgatacttttgttgaaagattgagtacaatgaaaggtatagattatgttcatctagctatagagcataggtggggtcaaagagcaattagattttatgatttagatgggcatattattgagattggagaaactatgtcatctgtgtgtagacgttttttagatagtggtctttcaatagatgaggtagctaaaagaatggatgtaactgtcgaatatattgaatcagttttagaatagatggattatattaaagtaaaactatattttgtatagaagtaagggctgtaagtaaacttgtatggaaacaaatttacttacagtttttgtttttgtaagatacagaatataatatttgttataattttatttggatttttaaaaagtgcatgattttccttacatattataatagaatttaatatttattggatgatttaaatttagaaaaatataagtattagcttataaaagataattatacttactatcaagctgtagaatcatatatactattttatgtaattatgttaaaatttaattgaacaaattaaaaatatagtgaaaattgtagttttagtttatttatttaataaatatttcaaataaaataatgtttaaataagaaacataaataataatattattattgttcttaaagacaaaaaatcttagcttaaaaatttgtatcatataaaatccctacatattatggaagtaatgatacattatatgatatacacaataaagtataaaagtatttacatgttttttctatatattttataagttttaggtatggaaaattactaaataaaaattagattaatgattatgatagtatagataaagtttattctttttattaatagaaattgttgtataaaaataataaaagtgaggagagtgatatttaaataaaaaaattttaataagtattggtaatatagtttttagggatgattattttatgtaaaaagttgttatttgtaaagataaatatagaaaatattataagtattgatttagtgataatctaaaaggtgagaattgtaataaaaagagaacatatccttcaaatggatgtaaacttataaataacattattacaagagatttattatacatatactgcaactattaattagaatttatactgtatttgtatttaaataaaaacacaaataatattattgtaaaaatttataattattaaatatttaaagtataagatataataattataagtaatttatgtataaatgtataaaatatagatatatttagattaaataataattattattatacaaaaattttgtattaaaaaatatctttaaatttgaaatataataaatgttagatagaattttataaaatttaaaataaaaaattatataaggggtgtaatatgattaatattattatttgcgaaggtaaaaaatcagagagggtaattctaaatgattatataaatacctttttttataattacaattttgaatacaatatcaaagagtttgaaaatggaggcgatttattaaaaaagtatcctaataatgttgatatcatatttatggatatagacttaaatgatgaaaatggatttaatgtttcaaaagaaatcaaaaaatttgatgaaagtgtaagaattatatttgtatcctcatcaaataaatacataaagaaaggttatgagataggagtttatagatatttagagaagcccttaaaatactctctatttaaagaagcaatatcatcatatttaaaagaatgctacaaaaatgaagctattttatctataaaatgtaaatgcaagatatatttcataaaggtagatgatattttatatttagaagttttaaaaaatgatttaactatacatactgaaaaaggaatatatacttttaagaatagtatgaaagaaatagaatcaaatctagaagaacataatttttttagatgtcataaaagctaccttataaatttaatgaaggtaaatatgctagatatagaaaataatattgtatttataaatcaaaattcaataattgtaagtcgttataagataaaattattgagagaaaagttaaatagttgtttggtagatgtaataatttgaggtaaatttttgcccttatattctattctaatagaatatatctattgtaaaatatgaaaaaatttataataaaaactaattatagttaaaaatatacctttcatcaataacagattgaatatattaagattttattttacaattctattaacaattttattttaaagatttaatttaaaatttaaatatgtattatacataataaaataatgttatattatattaattaataaaatattttatttcaattttattaagtatggaggtgtattgtggaaaatggtaaatttcaattttttaaaggtgtaagaaattgttttaatatgatttatctacatgataaaagatatttatttatctctatgtttatggcaatttttcaggggattgttccatctatttctttgttagtaagtcaaaatatcattaataatatgcaaacattttcgaaaagtgtaaaagaaatattagttttgttaattatgtatttaatcataaatataattccttcaatttttcaaagtttttatggatattatagaataaagtttaataaaaattttgaaaaacatattgaaacaatgatgttagagaaatctttaactttgagtttaaaagattttgaggatgataatacttatgacatgataaatagagctcaatctcaaaaaggatttaatattactatactatctgaaaaccttatttcaataataagagaatcagtatctacactttctcttattgttgtattatcacaatttcaactttggctaataatagttgttattgttattcctgtattgaaatcattatattccattaaattaggaaaggaacaatatgatgttagtgtaaacagaacttggaaagaaagaaaggcctggtacatagattatttgttgtcaaaaggttatgcttacaaagagattatggtatttagaattggttctaaacttattaatcattataaaaaattaaaagaggatattatatctcaagatatgaatatagctaaaaagaattttattgctacgctattatgtacagttttagattcaattgtatctgcaggaattataggatttataataattcaaggtattttaaagaagattttaataggagatgcgactacatatatacaagcagttcaatctataaaggataatgttgaatcaatattttcgttatttagttcagtaatacaagatcttttttatacagatttactgtttaaatttctagattataactgtaaagaagactcaattgaacatataaaaatatttgaaaaaataggggatataaataaaatagagttaataaatatttcatataaatacaatcattcatcagagtattctttaaaaaatattaatttaactttaaataaaaatgatcctattgctatactaggaaaaaatggttcaggtaaaacgacacttttaaaaatattattaggtttttatgatgattatgaaggtgacatcttgataaatggaaaaaatttaaaggatattgaaaaagatgaatacattagaaaagtaagttgtatgtttcaagattatattaaatatgaggctacattaaaagaaaatgtcgccatgggagatgtatataagagtaacttggaagaaaaagttaaaagtaaacttaaagaaactaaattgaaaccaagtatttatgaggaagatggattagaaactattttaggaacctggtttggtaagaagcaactttctatgggtgaatggcaaaaagtagcaatatctagaactcttatgaaagatgctgatatgtacatttttgatgaaccagattcatctttagattctgaagcgggaaatgaactcctttctttatataaaaaaacatttgaaaataagattggaatatttataacgcaccatatccaacatgcaaaaaagataactaacaatattgtagttcttgaaaatggaaagttgttagaaagtggaagacatgatgaacttatggacaaaaagggtgtttattttaatttattttgtaactgcaaataaatattaaagggaggttaattaatgaatcaaaaaccatttatacacacatttaaagctggaaaatcatattttatttatgatgttaatacggataagattttaaaggtaaatgctgctgtttataattatctaaataaaattgagcataatttagaaaaagaaagtgactggaacatagaaatagaagacgaaattaataccttgattaattatggatttctaaaaaataaaagggtaaataaaacaatgcaccctgaaactaagtatataaaatatcatatagaaaataatctatcctctattattttacaagtaacccaaaattgtaatttacgttgtgactattgcatttattctggttcatacagcaacagagttcatacaaataaaagaatgaatatagatgtagcaaaaagaagtattgactatttgattaagaattctagtcaattaaatgaagttagtgttggcttttatggaggagaacccttacttgagtttgatttgattaagcagatagtagaatatgtaaaagtagttggagaaggaaaggaaatatactttaatctaactacaaatgcaactttatttaatgaggaaataatagaattctttgtaaaaaataatataacaactatgattagtttagatggaggaaaagaaattcatgataaaagtagaaaatttgcaaatacaggagaaggatctcatgatgttgtattaaaaaatgtacgttacataaaaaataaatatccagaatattataaaaagaatattacatttaatacagtgataaattcagaaaatgattacatttctatagatgattttatatctaaaaatgagactttaaaagattcaaactttttagcttccactcttaataataactattctgataaagaaatagtttcatcagatgaatatatattaggtaagagttatgatagattcttgactttactcaacaaattaaaatttataaaagatgagagtatgtcacctttatcaagaatagaaagagccttattagatgattttagatatgagaaaaatattgaaggtagattagagttaccagatgtgtggcatcatggtggaccatgtataccaggggcttttagaatatttgtaactacagatggagaattttttccatgtgagagagtaagtgaaagttctaaaatgggtatgattggaaatttagatagtggagtagatatagaaaaggctgaaaaacttttaaatataggaaaattatatgaagagcaatgttctgattgttgggcctatagttattgtgatatatgtatagctaagattgatgatactaaatgtaatgaaaatgaaataaaaccacatgattgtgacagaattagacattctacagaaaataatatgaaagattactgcgttttgaaatctctaggatatcaatattaaattttctaatgaaaggaaagatgggattatggaaaaagtacttatatatccatttaattataatttttttactattttaaatcattgcaataaaatttcagatatagaaattaattcactggttagtccttctggctgggggttatgcaataaggagtataatgttaataatattattactaaagttacaaatgattttcaaagtgaacttaaaaagaattctttggtatggtttgttgattcaaaagaaaatctagacttagaaaaatttataattcctaaattaaaagtagctctaaaagaaggtaaaaagatattatatacacgtgatgatcttaataaaatatctaggtatatatctcattatgaattcaaaaagattaatgaatggaatttagaaaaatatgaaataagagatatagagggtatatcacagataaacacaccaataatatttatttgtggtctttatggagggttagatacttttgatgtaaatataaggataggagaagaactaagaaaaagggggttttcaatattacaatttggtcctaaaaaagagagctatttatttaaaatgattcctataccagagtttatgtttgatgattcgataagtagtaagacaaagattattaattttaaccattttataaaagataaagaggtagaggcaaagccagatttaataattatagaagttccaggagaattattccctttctctagaaaaatggttggtaattttggaattagagcttttgaaatttctaatgcagtaataaatgattgtggtatattatgtattccatcaagtatatatgatagagaatattgtgaagaacttaaatattttattaaaggaagacatggtataaatatagattattttagtatagagaaaaaagttatagatacatatgagacagaggtgaagcaaaaattttcatatatgtcattagatgaaaacttttttgttgaagatatagaagattatgaaaaaacattttttatacatgataataaacaattactagaattagtggacaatatagtgaatcaattaaaagagtatgctaaagtaatatctatttagaattggaggttaattatgaattacactgaaaaggaattactactagagaatatattttttgatgtgactggaattaattttaataaaaataacaatttaaaaaaagaattatttttttcaccgtctttacatatacagccaagagaattacttttagtattttgcgaggtaatagaaaactttaatataaaaattccagaggaaaaacttttgaataggcaatttacgagttttgataatgttctaaaaataatcaatatggtataggttaataaaggtataaagtaagtgatcttatagaaaaggggaggatatgaatgagttttggaaaaagaatagaaatgaataatataggtgttgagacaagaggtgtttgtactattatgtgtccttatacttgtaagatgatggcatcttcatcttgtaactgcaagaataatgattataatgcaagaggaggatcatataatacatattataataaattgatacatggtcaaagaactcctgatggaatgtaaatatttcagtaataagtatactattaaattgatttagcatatttgattaaatttatctttcttactttatttccttttattataaaaatatgcagttgattataattaagagtgtgattttataataactgcataaatagtatctgttatataaatcacctcttcaattattatagtggtaaatatagtgattaggggtgatttttacaatttaaaagtataaattaattaaaagttattataataaattatacttatttaaatagtaagaattaaaagtaaagtttttaaatatatttgtaaaaatgtatatatattaataatattgattagaattaatatattatttcaatatttaaacattatttattggtactaatttccaaaatagttaattggatatacaatattattataaaaaataaatattatttattttagattttagaaattgaaatttccttaagtgaaggaggtaattagatgattagtatgattatgatgcttattggagtattatttatagtgtttgggataattttaactgctgtcgaaataaaaggaaaaatgccaggtttttatggagttgggcaaaatgcagtaagaaaaaatgctatagggattatagcagcaggtatagcattaattttttttagaaatgggttagatagtattgattcaattcttacctatggagtatttttagtgatagagttagtagtaataggattatattttcttataagaataaaatatgataaagatgggaatctttaaagtataaattaataatattttgattttgatatatgtttatataaaaaaattgtagataaattttataaaatagttttatctacaatttttttatatttattatattttatgagaagtaatagtataaaatattattgaattttttctctcgaaatatataatttagaatcttctgatttatttttatgctcgatttccttattttttttcataaatatatatagaggagctattaacaacattgcccctaatcctattaagactctattttgagttataggttttgaaatatcttctgcccaagcttgttgtaacaaccataagctacctaaaatagctaccattggtataacaggaccaaatggaatcttaaaagaggccttaacatctgttctttttcttaaaactattactgataaacaagttggtatgtactgagcaaatcttgcaattacactcattactgcaagttgttcaaaacttccagttagcacaagtggtatacaacaaattaaagatattattattgctacatatggagcaccatatttatttgtttttcctataaatgcaggaagagaaccttcttctgctagagaagaaccacatttaggagttactattgatgaacctatatttataccaaatatagatattaatgttgctacagatatgaaaactttaccataattgcctaaaaatacacttgaagcatctgcaattggaatactgttttcaaatagtctatctccaagtatacccatacagacaatttgaattaatatataaattattgcacatataaatattgtggttattaatgcgattggaagattttttttaggattttccatttctccacttgccacaataaatgattcaaagccggtaaatgcgtaaaatactaatataatggctggacccatactagagttaactacatttcctgaaggaacaatatttacaaattttataaagaatattccaactatcacaaaaactattaatggtactaatttagctatagttattacattattcattatctttgtgcttttaattccaaataagctatttattgaaagtagtgttacgagtattgcagctatacaacctttgtattcagtggcagattctggccaaaatgaacctaaagctgttgcaaatcctactgctagagtagaccatgatataattctaataaaccaagacattgtaccaacttcaaatcctataaaatctccaaaagcttttttggagtatagatatgctcctccattcttatcaaacatgcttccaacttctgcaaaacataaaagtattgatagaactaagagtgtagcaaaaatgtatataaacatactgttttgacctgctagactataaactttacctggtagtaagaatatacctgaacctattatgctattaatccctaataatatcatactaaatagacctaatttcttagctttttccatattaatttatctcctattcttttattaattactgtactaattaaaatacaaagtattcattacatgcatcataacacctattggtaaacaatcttcatctatattgaagctagaggtatgaagaggtgaaattaagcccttttcctcatttttacatcctaaatggaagaatgctcctttacaatgttctgtgtaaaaagaaaagtcttcaccacctaaagacgggtttggtctcaatataaatttttcctctccaagtaattctttagtacttgatataactgtatctactaattctttttcatttataacagcaggatagttttcatcacttacatgtaaagtcccaacacaaccaaatgcagatgcagtgtctccaacaattttagctattttatcaatcataaagtttcttgttttgctatttaaggttcttaaagtgccttctagttttacatcttcacatattacattgtgtgcatcaccaccatatattttacctatagtcaaaacggcagcattatttggttctaagtttctacttattatagtttgtaatgatgtaacaatttgtgaagctgtaactattgcatcaataccattttcaggatatgcaccatgagctcttttacctttgatacttatttttatagtgtctacactagcatttaatgtatcatattttgtttcgataaggcctgtttctatatgtggcataacatgaagtccgaatatataatcggccttggggttttctaaacacccatcctcaactaaaaattttgctcctccaaaaccttcttctgctggttgaaataagaattttacatttacattaagtttatcttttattgaatgtaaaactttacatgctccaagtagcatggttgtatgtgcatcgtgaccacaagcatgcatttttccagaatgtattgatttataaggtatgttgttttcttcttcaataggaagagcatccatatctgctcttatacaaatcgttttatctgcactttcttttaaaatatatgccataattccattgtgttttgtaaattccatataatcaattccgatttcttttaaataagaaattaccttctgtttagtaagattttcttcaagagctaattctggaattttatgtaattctcttcttatgtttataagccatggttttatagaattacaactttctattacaaaatcttttcctaattctttggtttgatattttaatttcaaagcctgttgcatttttattcctccaattgctttttattgttttattaatataataagcaattattatgccataattttcgatggagaattttgttttttataagaatattgaataaatataatcatttatctatatgtatagtataaaaaatgattgcatagtttcaattttcagtaaaaaatattattttgaagaaaatatattttatatgctagtttatataaaaaaaataggaaataaaaaaattatcctattcctattaattcctattatttatgtacaaaataaattataattttagggtacttgaaaaataaaaaaacctattgaaggagtactttaatcctgaatagatttctttgtttgataaattataattttatagacctttatattttaatttattgtaaaaatcttctcctttttgagttattttacttccatatcttcctgaactacaaattataagttcttctttttttagatattcaaatatttttttaatttttccttctgtaatttgaaggttcttatcgagtagtgcttttaaaattaatcccctaccaataccaacatctgattccttatttaaaattagtatctctaatatattcaatatatcattcttactatattttagttttaatgatgtatttttgttatctgaagaccttaagtttggaggtaaatctttctctaatacaatatcttcacacataatgtttaaataggatgtaacattttggagttctcttatattacctttccacatatagttttgtataagtttttttgcttctggtgtgattactaatttcttattaattaaatcttccataataattaatatgtcttcttttctttctcttagaggaggtatatttattggaattgtatttaatcgataatataaatcctctctaaattggctattatcaatcatttgttctaaattcttatttgtagcagatatgattctaacatctatattaattacattgtgagacccaacaggcattatctgcttctcttgaagaactctaagtagttttgtttgtaattctaaaggcatatcgcctatttcatctaagaatattgttccattattagcaagttcaaataatccttgttttccatcttttagacctccagtaaaagttcccttgtcatatccgaatagctggctttctaataaattttcaggaacggctgcacaatttactgctataaaaggttgattttttctatttgagttgttatgtatagactgagctatgagttctttaccagttccactttcacctctgataagtatgcttaagtcagatttagaaaccttcttagctaaatctatacattcaaacattttaggactatttgtttttatatccttaaatgtatattttgctatttgtcctttttctcttaattttttagtgagattttgttctaatttttttatgtatgttatttcttgtaaactataatatgtgcccattttttcatccctattgtatatgttttttttatttacatttatatatttcttattgaatacgacaactttatctagtatctctttctcactcaataaaacttttaaactatctacaaatatatcatcaatgtattttccatatatatcctcatttatgtctaaaatatcttttactttactattatatgtatttatttcaccatcttttgaagtaaataatataccatcttttgataaattcaatattgtatctaattcttctatttttaaaaataattccttatatttatcttttataccagtatctaaacttattatttcttctgagtatttaactagattagattgtatttcctttgaatcaatttgtaataaatttattatttctataaatgtagaaatatctatatatctgtgacctaaatcaaatatatctgagataaagctaggtactttttctggaactcctggagttatagctatttttatatttttatagttattatcattcatatatggaattggtctaatattagtcactccaattttataaaataaacttatagtttctagagtagtttcatcagaatcatttacgattagagcatttgtaccctgtggtaaagatagtagattataaattttatcttccctaaaagttcttcttaccacaatcacttttttcttatctagtatattatttataattttgtctaatctttctactgacattactaatatcacatcatcatttataatatcattatcatttatttcatttatgaagtatctattaatatttatagaatctccaaaaactaatttcaaattattttctaaaaagtctattaaatcttttctactatcatttaccagagctactgattttttcatttatttctccttatataataaatagtttccaacaaaatagttgtataaagcaatgtaattttgataatttaaatttatcaaataaaaaagaaagtgtctataatgactttataaaagttgcattaagacactttctttcttataattaaaaatcttgtcaccaaatccccctaattgttgcttaaaacttaaactgtatgtatatttttcatttctattcgattaaattataatatacacccaaaaaaatttattttaataaattctattgataatataattttgtaaatatagaattatattaaaataaattatatatgaaaatatatatgtataagtttattctgcgtgagtagaatgaatttgtcaagtttaatttagttgtaattgtatcttttattaaaaataatataaattaaaacatataaataaaatattttatacaatatattgtaaaggaggtaactttgatgaaagcagaaaaaacaagtatatatccaattattaaaaataatttaaacaaaatatcaattgttgaatataaaaagggtcaaagatttgtagcatcagataaagacttacaagaagtgttctttataatagagggagttgcattagtggagtgtactactagaggaggaaataaatttcttgttgacattgtacctgaaaatgaatttataggcaaaatcagttacatatatgaacataatttgaaatgtgatatatttgcaaagaccaatataaaattatttcgatttgaaaaaaatgtatttgaagagttttatctcaaaccagattttattgcactatttcacagaaaatgtacaagaagaatatatgaattatataaaaccagaatggtaagagaactattttcttgcacagaagttattgcctattgtatatcaaataaacaagaaaataatgtctgcaatataaaagctattcgtaatttcagtgaaatctattcaattagtagaaaaagtagataccattctctgctaaagttaactgaaaaggagatagtaaaaaaaatgggtaatacatatgaaattttaaactatgatgaattacataaattggcatttgaagtaaaagagtttttggaagatgagtaaaaattgttacttaatcaaaataaagtataataatttctgtaaaaaatagaaatagtctcactgaaaatcaaaaatactttagttattttcaatgagactgtttagaaatattgtatacttataatgtatagtataattattaatcaatttcctttactatattaatagcccattttttagataatgctctaggaacaccaaatataaacttaaccacttcttcactataagtgagtaaaacgagtacaaatataggtgcacctttaaatgcagctataaaagttagaggaatagaagctaaccacatacatcctaattctagaaatagagcatatttagtatctcctccacttcttaaaataccaattataaccaatgtattaaaagatttaagagccattagtattcccatgataaagaatatcttagttatatcagaagctaagctatcagaaacactaaacatttttaataataatggtatatttaaaattaaaataattccaagtattaaaccagctgaaaatacaagtatagaaaactttttagcatattcaatggctcttttaatatggtcagctccaagttcatttccaagcataatagatgcaccagatgcaatacatacagctgtcattatgaagaaattacctgtactggttgctatctggctagctgctatagcagaagtaccagctcttgcatatgcaacagaatacaggacagttccaattgcccatacagagtcatttacaaatataggaaagctttttgatgaaaaagattttataaaaattttatcaatagcttttagattttttagaccaaactttaatatatagtcttttttataaaggtaaacataagtaatcattaaaattaattcacatattctagcaataacagtagctagagcagcaccttttacacccaatgcgggaagaccgaagttaccaaatataaatccataatttaaaataacatttgttacaagtgcaaatgcactacaaatcatacctaacttaggatttctaacacctcttgaaccagtactaaatacagtacttacagcaattaatggataactaaatactgcaatactaaagtaatctatacaaagttttaccacctcagaatcatacgaaaatatgtgtataattggctttggtgttagtaaagcaggaataacaaatacaaaacttaaaacaattgccaatacacaagtaagacctgtgacttttcttatattactcacatccttctttccataaaactgtgaaataaaaactccagcacctcctgtgataccagataaggacatattaaaaagaaagaaaaattggtttgcaactccaactgaagctacagatgtctcccccaaactacttatcataattgtatctattacatttacagaagtagaaattaagttctgtatgataataggtatacataaagatagaagtattttataaaatcttttattttcgtcttttaaagaaaatagttcttgcaaataatcctctcctttttacataaattcttcccactcatcatatagagaggcaaggttattttctaaattaattttttcttggctaacttctttagctttatctggattagagtatacttcttcttgacataaaagtatatctaatttttcaatttcaatctctaacttttcaatttctttttctatattttgtctttttattctatttttcttttctatttctctttgttctctctcttttcttttttcatcttttatttgagttctagttttttcttctttttcttctataatactcatctcttggatttgcctttttttatctatataataatcataatttcccagatattcagtaattccattttcatctaaaactaaaattttatcaacaacagtatttagaaagtatctatcatgtgatattgtaaatatagtcccatcataattagttaatgcctcttcaaggacttccttagaatcaatatctaggtgattagtaggctcatctaataacaataagtttgcatttgatagtataagtttaagtatggcaactctagctctttctccaccactcaatgtagaaatcttcttaaaaacttcttcatctacaaataaaaatgcccctaacatatttctcaaagtagtttgagtaagatgagtattattttcccaaatctcatcaattattgtgttatctaaattaagagttttttgttcctgatggaagtaggaaacatgtacattagttccaaatttaatattgccactaagaggttgtagttcattagttattattttaaataatgtagatttgccaacaccatttgcacctataagtgcaactttttcccctctatatatatctaaatccaagtctttaaaaagtattctttctccataacccatagatacatctctaatttgaagaacatcattaccactctggacagaaggcgtaaattgtatacgagcttttttcctataagcttctggtttatctaaaacgtctaccttgtctaatgctttttctttacttcttgcacgctttaggtgtttttctctaccataagcttttagtctttcaattgattcttcttgcttttttatttctttttgttggtcttcaaatttcttaagctctagttctttttctattttagataactcaacaaatttagagtagttaccattatatactttaagttttttgttgtgaacttcaaaaattctatttacggattggtctaagaaatatctatcatgagatattaacatgacagttcctttatattgttttaaaaatacttctaaccattctattgcttcagagtctaagtggttagtaggttcatcaagtaacaatagagttggtttcttaagaagtaattttcctaaaagaactctagttttttcaccaccagaaagtatgcttattggcttatccatatcattgtcactaaatcctaatccttttagaactcctttggcttcagatttatatccatatccatttaaatctgaaaataattctagtttatgtgaatattcatccatgattttttctataattggagagtttgtttttgtactttcttcagatattttaacctccaattctcttaaataggattccatttctatcaaatttttaaaaacttctagcacttcttccaaaatagtattatccgaataaaaattggtattttgttctaaatatccgatttcacaatctttagaagtataaatatctccactatcatatccataaattcctgaaattattttaaataaagtagtttttccagtaccattaacaccgattataccaattttatcgccttcatttactgtaaaactaatattttctaatatagaatctataccaaaacttttatttaagttattacatgacaaaacaatcataaatttctacctccttgaactatctaaaattataatgttttgatataatataatcaaggttatatgtattagttttgaaaaagaaatattttattgtgaatcaaacaaaaaagaggacacttttaggaggtgaagatgttgggaaataaaaatatatcaatggcagttataagaaggctcccaaaatatcatagatatcttggagacttattagatagggatatacaaagaatatcttctaaagaattgagtgatataatagggtttaccgcttctcaaataagacaagatttaaacaactttggtggatttggacaacaaggatatggttataatgtagaagctcttcatactgagataggtaaaattcttgggttggatcgaccatacaacgcagttcttgtaggagcaggtaacttaggacaagctatagccaattatgcaggatttagaaaagctggattcgagataaaagctttatttgatgcaaatcctagaatgataggtttaaagataagagagtttgaagtattagattcagatactttagaagactttataaaaaacaataatatagatattgctgtattatgtatacctaaaaatggagcacaagaagttattaatagagttgtaaaagctggaatcaaaggtgtatggaattttgcacctttagatttagaagttccgaaaggtgttatagttgaaaatgtaaacttaacagaaagtttatttaccttatcgtatttaatgaaagaaggaaagtagacaacttaaacatattaataatgagcagttgtgaagagtattgagaaagtcagaagatttaatattaaatcctctggctttttgaaatattaggataaaaatttaaataatgtatggaaataaacaatattaaggagagtggtttttgtggaggaattatggaaaaaggcaattgaatttcatggtcatgaatgtccagggttagctataggatttaaagcagcacttgcagcaagaaaatatttaggatgtaaacagtcaggagatgaggaaattgtatgtatttctgaaaatgatgcttgtggaatagatggtatacaagtcgtgctaagttgcacaatgggtaaaggaaatttactacttaggatgactgggaaatcagtatatcatttctttaatagggaaaatggaaaatctataagaatatatgtaaagtcaaagccatttcaaatggatagagaaggatacaaaaagtacttattagaaagtgattttgaagaaatatttgagattacagatactaagttaagacttcctgaaaaagcaagaatatttaaatctcttaaatgtgaagtgtgtggtgaatttgcatctgagcaatatataaggattgaagaaggaaagaaagtatgtcttgattgctttaataaatatgaaagattttatgaggagtattaaaattataaattagattaaagttaaaagtattagatatgtactaacagtattttaagatgaattaggtagcaacataataaaatatataaataatattacttgaaccatacataattaaaaagaggctgattagtatttagaaaataaaatcagtctctttatgaataacgaattattattctggttgaggtgcatctacaggacaagctcctgcacaagaaccacagtctatacaagaaccagcatctataacatatgcgtcgtctccagctgatatacagctaacagggcattcagcctcacaagcaccacagcttatacaagcgtcagtaattttatatgccattttgaaatcctcccttttatatgtattgtaattcaataacattataacaaatattattgaatataacaattaaattaattctacaacaaaaactttattatgatattcttgttttaaagttttacaataaagtttaatctgcttatatttttatttattttaaagaagtttattttaaaaataaaattaaatttaaaaagttatgtattgattatatttaaaaatgttatactctaaaaaagtatattttattttaaaatttattaatacaaaggagatttactatgaaaaataaattagtttacatatgtattatgagtctattgctatttgtagtaggatgttctaataatccaaataaggaaagtaccattaaaaaagactctaagaataaccaaagccaagttaaagaagaaaaaagagaacctgtgaaaaaagatataactataagtttcgctggtgatgtaactatggggaactataaaggttcatcatattatggcagttttgaccatgaatttaaaagacaaggagaagattacaattattttcttaaaaatgtaaaacctgtatttgaaaaagatgacttaacagtggttaatttagaaggtccacttactacagcgtcaaatgcaaaagaaaaaaaatttgcatttaaaggaaagcctggatatgtaaatattttaaaatctggaagtatagaggcagtaagtattgcaaataatcattcagaagattattttgaagaaggaatgaaagatacacagtttatattggatgagaataaaataaattattttggattagggaaagatgctgttgtagatgtcaaaggaattaaagtgggtctattagggtataatggattatcaactgaatataatgaaaaaaatttaaaacaaatggaagatgatattaagtccttaaaaaagaaatcggatgttgttgtagtgtactttcattgggggatagaattagattattatccagataaaaaacaaaaagattttgctcattatgctatagacaagggagcagatttagttatggggtctcacccacatgttattcaaggaatagaaaagtataaaaataagtatatagcttatagtctagggaatttttgctttggaggaaataagaatccttctgatacagatagttatatatatcaacaaacctttactttttcagataataaattaacttcaattaaagagccaaatataataccaacctcaataacatctagtagctccagaaataattatcaaccaaaagtattggatggaagtgagaaggatagagttttaaataaacttgaaaaaataagcaaagatttaaataaataaaatgtaaaaaaaaataaatatatatatttattttaataatttatattttgtttagggtatggtaaatcgtggtattaaataagtagattttaatagttaaattatagtcaattataataaagctatttaatctacttttttaatataaaaatataagggggaatttgtaatggcttgtaacacttgtaaaatgtgcgaaagtgcagacaagaaattagaaagttttgtagcttcaaaggatgttgaaacagcatttcatagaacagaagatcagaaagttaagtgtggttttggacttcagggggtttgttgtagactctgttcaaatggaccatgtagagtaactcctaaatcaccaagaggtatatgtggagcagatgcagacactatagtagcaagaaactttttaagagcagtagcatcaggagcagcttgttatttacatgtggtagaaaatacagctaagaatttaaaaaatgttggaataactaaaggtgttgttaaaggagaaaaaacattaaatcaattagcagagatgtttggaatagaaagtgatgaaaagtatgataaatgtataaaggttgcagacaaagttatcaacgatttgtataaatcaagagatgataaaatggaattagtagaaaaaatagcttatgcacctagagtgaaaaagtggaaagagttaggtataatgcctggtggtgcaaagtcagaagtttttgatgcaatagtaaaatcatcaacaaatttaaatagtgatccagtagacatgctagttaattgtttgaacttaggtatatcaacaggattatatggtcttacactaactaatcttttaaatgatgttatgttgggagaaccagttataagaatggctcctgtaggatttaatgtaatagacccagactacataaatataatgataacaggccatcaacattcaacatttgcaaatttccaagatagattaaaagatgaagatgttataaaattagctcaatctgttggtgcaaaaggctttaagctagtaggatgtacatgtgttggtcaagatttacaattaagaggagaacattatcaagaagtatttgctggacatgcaggtaacaattttacaagtgaggctgttttatcaactggagcaatagatatagttctttcagaatttaactgtactataccagggcttgaaccaatagcagataaatataaagtaaaaatggtttgtttagatgatgttgctaaaaaagcgaatgcagaatacataggtttagacagaagtaaattagatgaacttagtaacactttaatagaaaaagcattggagtcttataaggagagaagaggaagtattgagatagatataccaaaagaccatggatttgaacaatctttaactggtgtaagtgaaaagaacctgaaagcgtttttgggagattcatggaaacctcttattaatttaattgcagaaggaaaaattaaaggtgttgcagctgttgtaggatgttcaaatatgacagcaggaggacatgatgtaaatactgttgaacttactaaagaattgattaaaaaagatataatagtactatctgcaggatgttctactggaggattagaaaatgttggtcttatgtcacctggagcagaagaattagcaggagaaaacttaaaagaagtatgtaagactttaggaataccaccagtattaaactttggaccatgtctagctataggaagactagaaatagtagcaacagaattagcagctgaacttggaattgacctaccacaattaccattagtgctttcagctccacaatggttggaagaacaagcattagctgatggagcgtttggtcttgcccttggcttacctcttcatttagctttacctccatttataacaggaggaaaattggtgacagaagtattaacagaaaaattaaaagacttaacaggaggacatgttatagtgaatccagaccctaaatcttcagctaatcaattagaagaaataataatagatagaagaaaaaatttagggttaaaggatgtggaatgcaatgcatagaatttttataaataaagatttatgtacaggatgtaagagctgtgtactagcatgtatgctaaaacacaataaagattatgacatgtacactcttgatttagaaaatatagataatgatagtagagggcatatagaattagatagtaaacataataatccagttccaattctttgtagacactgtgatgaacctgaatgtgtattagcatgtatgagtggtgcaatgcataaagatagtgaaagtggaatcgtttcatatgatgaagagaaatgtggttcatgttatatgtgtgtaatgtcttgtccatatggattattaaagccagatgatagaagcaagcaaaacatacttaaatgtgatttatgtaaagatgaggagtatcctagatgtgtagctaattgcccaagtggagcaattgaattacagaaggaggaaaatgatgaattatgtagtgttaggggctagtgcagctggtataaatgcagtaaaaacattaagagaattagataaagattcaaatatagtagtaatttctaaagatgaaaacgtatattcaagatgtatgttgcatcacgttatatctgaacacagaactttaaaacaaataaattttgttgatgaagattttatggagcaaaataatgtaaaatggattgcaggtaagactgttaaaggtatagacataaataaaaaggtagttcaaacagaagacattactgtaaattatgataaacttttaatagctacaggtgcatcttctgctattcctcctataaaaaatttaagagatggaaattttgtatattctgtgagaaacatagatgatatttataaaataaaagaaaaagcacaaaattctaaaaatgtagttataataggtgctggtttagttggtatagatgcattagtgggattatttaaatatgagcagttaaatatttctgtagcttttatggaaaagtacattttagatagacaattggatgaatatacagcatcagtgtatgaaaataagttcaaagaaaaaggtgtaaaattttacccaagtgcatcaatacaagaaattgtattggataacagtaaaaatgttacaggtgttgcattttcaaatggtgaagttttagatgcagacatggtaattgtagctacaggggttaaaccaaatgctgactttttagatgggacaggaatagaatatgatagaggtataataatagatgatatgtgccaaacaacacaaaaagacatatatgcagcaggagatgttgtaggtaaaaatgctatttggcctctggcagtaaagcaaggaattgtagctgcctataatatggttggaaaagataagaagatagaagatgaatttgcttttaaaaatagtatgaatttcatggatataccaactatttctataggaatgaatacacctgtagatgatagctataaagtattaaccagacatggaattaatgattataagaagtttgtttttaaagataatgtaatctacggagcagttatacaaggagatatttcatatgtaggtgtattaacttatttaataaaaaataaagttgaaatatatgatttagaaaataggatatttgatgtatgttatgcagacttttttaatataaaagaaaatggagaattttgttatagtgtatagtatatacgtggagtaaggtttataaatacagtaaatcaataaatagagttattctaaaataagaaaaatgacaaatcttatttagaaatagctctattttttgtaattaaatttaaattatattcaatttgtaaaatattattttgaacaattatacatatactctctagttagaggtaaatcattttttatacctttagtgaaaagtatttgatgtatatctataataccagtgttgaaagcagcagcacaagaacaaaggtataaatcccacattcttataaacttatcatcaaacatttctttaatctttggaagattctcagagaaacttttttgccagtatagtaaggtttttacataatgtaatcttaaactttctacgtctatagtatgatatttgtaatcactacaaatatgtatcatttctcttaggctaggaataactcctcctgggaaaatatatttttttatccaagggtctccataagattcctgcaatccacttatatagtgaagtaaaaacaatccaccatcttttaaaacagcatttacgtttttaatgaaaagttcatagttttctctaccaacatgttcaagcattccaacgcttacaactctatcaaacataaggtctgatttttttaattctctatagtccataagtcttacctcaagatagtcttgaaggttctcttctttaattcttgcgttaaattccttaaattgctcttcgctaagtgtaattccaacgccgtgaattttatatttttttgcagcttctattagtaaaaatccccaaccacaaccaatatcgagaaggctcataccttcctctaaatttagtttagttaatatgtggtgaactttattgacttgagcatcataaagagtatcattatcatttctaaagtatgcacaagaataactaagtgtcttatctaaccataagctataaaaatcgttgccaatgtcatagtgggcatgtatttctttcttctgatgtctcattgaatttgatgagtgcaatagatgttttacagctgaattatcaatattgaatttgtctatttgttttaaaagtagatttaaagttaagaataaatctccctcaacttcaatgtctctatttatgtaggcttctccaagtgctaaagatgtactttttaatagttcagacttgctaatatcattatttactataactttgaactgaggggagccctctccaattagaaattcttcctcatctttaagcctaactagaaatggtgtttcaccaaatttctctaaatagtcttttaaaaaattttttgtaatattcatattaccagctccttctaatgtaaatccagtaagtttccctgcttaaaatatattatagtcctttttttaaaaaagtaaaattttttcaataaattttttatttaaaggaaatttattttttataaagaaatttcatgttgtagtatattttttgcttataaattttggtactggatataatattaaactgttaatgatataataaatttaatctataaagtaaataaaattttgtaataaatagttaaagctattttataaggagatatatgatggaagtatatgctttggttgggtcaagtggcacagggaagagctttaaggctttagagttcgcatatgaaaatgatatagaatatataatcgatgatgggattttaatatacaaaaacaaggttttagctgggatatcggcaaaacaagcaaatactactatagaagcagttaaaagggctattttttataatctggagcatagacaagaagttagagaagcaattaaaaaagaaaatataagaaaaattcttattattgggacatcaaaaaaaatggttaatcaaattgtagagagattgtcaattggaagggtctgtaagtttataaatatacaagatataagtactaaatatgaaatagaaatagcaaaacaagctagaaaagaaggaaatcatgtaattcctgttccagccgttgagataaaaagtatggcaagtggtctcagtataaattctttgaagagactttttagaaaaggaaataataggaatatggtagttttagaaaaaacaattataagaccaacttttagttatataggaaagttttatattagtgctgatgtaattaaacagattattgaatatgaagtatacaactttggaagcattgatagaataaataaaatcaatatagagaattgcaataattttatgaatatttttgtaagtataaatatcaatgatttagaaactataaaaaaaattgaagacatacaacagacaataaaaaagtctattgagaaaatgactttagttaatgtacaaaaaatagatattaacattcataaaattaaaaaaataaacttcctccaatgttaaaaaataaactgagaaaatgatatactaatttgcaataaagtgtgctataattaaactgtaaatttaggaaatggttttttctaaatggagtatacataattataacgtatttataagggggctttcaaatgtcaggaaaagatgtaaatgtcttcgagatggcgcaatctcaagtaaaaaatgcatgtgataaattaggtatggaaccagcagtttatgaattattaaaagaacctatgagagttatagaggtttcaattccagtaaaaatggatgatggttctataaaaacttttaaaggatttagatcacaacataatgatgcagtagggccaacaaaaggtggaataagattccatcaaaatgtttcaagagacgaagtaaaagctttatctatatggatgactttcaagtgttctgtaacaggtataccatatggtggaggtaaaggtggaataatagtagatccatcaactttatctcaaggtgaattagaaagattaagtagaggatacatagatggaatatataaattaataggtgaaaaagttgacgttcctgcaccagacgtaaatactaatggtcaaataatgtcttggatggttgatgagtacaataaattaactggacaaagttctataggtgttataactggtaagccagttgaatttggtggttctttaggaagaacagctgctactggatttggtgttgctgttactgcaagagaagctgctgctaaattaggaatagacatgaaaaaagctaaaatagctgttcaaggtataggaaacgttggttcttatacagttcttaactgtgaaaaacttggtggtactgttgtagctatggctgaatggtgtaaatcagaaggttcttatgctatatacaatgaaaatggtttagatggtcaagctatgttagattatatgaaagaacatggtaacttattaaacttcccaggagctaagagaatatctttagaagagttctgggcttcagatgttgatatagtaataccagctgcattagaaaactctataactaaagaagttgctgaatctataaaagctaaattagtttgtgaggctgctaatggaccaactactccagaggctgacgaagtatttgctgaaagaggaatagttcttactccagatatattaactaatgctggtggagttacagtttcttacttcgagtgggtacaaaacttatatggatactactggtcagaagaagaagtagagcaaaaagaagaaatagctatggttaaagcatttgaatctatttggaaaatcaaagaagagtacaatgttacaatgagagaagctgcttacatgcattcaattaagaaagttgctgaagctatgaaattaagaggatggtactaagatttactcttaataaataataggatataattatttaagatataaaggggctgtacatagtacagcccttaaattatgtggcttacaatgaagtaagctatttttgttttaacttataaataacttgataaattatgtaatttagaatgcataaataagatgggtgaaaattaatggttgatttaattttgaatgtattttttaccaccacatgattacaaattagaggagttagattggatttttggacatgaacttatgtattttaaaagcaaagaccttcatttaaagtatctagtattatttttaaaaatagtatattggtttaatccatttatatatataatggaaaaatatatggatttggattgtgaactttattgtgatgagagagttttaaaaaattgtactgtacaacaaaagcaagaatatgctctaactattgtaaattcaatgaaaagaggtataaatttttcaaataaatttgtaactggattaaataaacaatctgatattagaaaaagagtaatgaacatgttcagtgaaaaacataaaaatggtatcttaatggctttgattataagcttgttttcttctattacattttttaaattcgattcaactagtcttattgaagagaatgatttcttagagaggtcaagatatgcgtttgaaggaaggcaagaagacatgtttgtaacaatagattctacatatgcagatgcacctataaaacttagaaaagagcatgaagaaaactgtagagtcaatggaatagtaccaaaagattcagattcaatagaaattattcctagattttataaagattgtatggatttaaaaaaataagttagacttaatattgatgttgatattatgaattttttatatttaagcaattgaaaattttattatagattcaattttatatgtgtttaagtatgaaatttatagatagttgaaataattaaatatgattgatgcataggaatcattactaagctataattaattataggggagtttaaataaattatgagttacacaattataaaatgataaaaaatagttatctgttacaaaaaatgtatctttttaattaataaagataatatgaaaacttaaaaggcaaataaacttaaacataaaatactcttaaataagataggagaaaaatgtatgtctaactttattctaaatgggatttttagaacagttatagtaagtagtctaagcattcttctgatattgattttcaagaaaaatgtatttaaaagatttagcaaaaaatttaattattatatatggatgatagttgttattaaattatttttaccatttacatattatacttttacaataaatatcttgagaagtaaaaaacacattaatattaataacataaatttagagggatttaataatgtttcaactataagtaataatattatattgtacacttggattataactgtagtagtgtatttaatttacactatatttaaatatataaaacttaaaaatttaataaatgacttatcttatgatgttgatgatagagagattgtaaatctttataaaaatatattagaagaatttaatataacaaaagatataaaactcaaatactcttatgaagttgaaacaccagcattttttaattcatgtgtacttttgccaccacatgagtataaattgaaagagttagactggatttttagacatgagcttatgcattttaagagtagggacctttatttaaaatatgtaatcctgtttttaaaaacagtatattggtttaatccatttatatatataatggataaacatatagatttagattgtgaactttattgtgatgaaagagttttaaaaaatcgaaattcagaggaaaaaaaggattatgctttaacaattctaaatgcaatgagaaaaggttcaaatacttcaaataaatttatagctggactccataagcaatctgatattaaaaagagagttatgaatatgtttaatgaaaagtacaagaatggtatattaatggcattaactttatgtttattatcttctattacttttttgaaggttaattcaacgagtattgttaatcttaatgtattacctaaaggatttgaagacttacgaactgttagcagtatacgtttttcagttataggatttacatatgcagatgctcctaaaaatatgagggaagaatataaaataaattgtgaatcattaggtttgatacctaaagactctgataaaatagaagttggtgtagaatattatgacagtctattgaatgattaaataaatattattttaacagatattaattataaagttttgaatagtaatttgttgagaaataaatatatccttataaaaatagatacttatataccaagaataaaaaatagttaagatagtacacaaggatatacttataaagaacttaaataagtgaaataaattattaattataaggtttataattttaaaaaattagataaattcaggtgtaaaatactataaaacacaattcggaaaagtgtatgttgaacttcatttaaaatagaattttcaaagttgttatagtaagtagtttaagcattcttcttatattaatctttgagaataatgtacttaaaaaagttagtaaaaaatttaactattgtatattaatgatagttgctattgatatattatctaaaaaaattaagtatgaaaagattactgctaggacaatcttttcatacttaattttttaatatttatattctccaaaattttcatctttttaacttagaattattagaatttgagaatcactattaggaaataggttttgatttatgcagggttaaaaatttcacagaatatctaactttatactaaatccatcaaaaaatatacgccatataaaagcgcataaaaaaacacataaaacaatatttatgcgcactttaacctcgaatggtacaaaattctttacttttacagacccatattatataattaagtaaataatgtatatttaggtgacatattggataagctaatttatttattttattaatataatgatactataaaagttatataaagtggtttacaaaaaagttacagatagagcttttattaatgtattgtgtattagtattttatccttaggtacacttcacctacaaaatagaatcataagataattatgggaaaattttaggaggtttatcgtgaagaaaaagatattaataccagtatttgcatcagttatggcattatcagtaagttcaattgtaaatgcagatgaagtaaatgattcatctcaaaataaggatgataaaacaaatactgaattaaatttaggtgaatataaagaagtaaaatataaagttgcaaaaataaaagatggagtagctataaagataagagaagaaggtcaagttcaaaacatagcttattctggagatgaatttacggttttaggaactcaaggagaatgggttaaggttaaagttgaagatggcgaaggttggttagctactagatatgtagatatatctgaaggtgtaggatatactaacgctgataaagtaaacttaagaaaagataagagtgaaagttcagaagtaattgaagagctggaaaaaggaagttctttattggttttggaggataatggagattggttaaaagttaaagatggggaaacagaaggatatgtaaaatcatcttatatatctgataaagctcctgtaatagaagagccacaagtaaacccaagtattgaccaaaatgtagattctacaaataataatcaacaaaacaatgcaaatactaatcaacaaaataataattcaaatgtgccaacagctaactctaatgcagttcaagctgtacttaacttggcatattctaagcaaggttgtccatatgtttggggagcagaaggaccaaacacttttgactgttctggatttacacaatatgtgtatagaaatgcagtaggaaagaatataccaagaacatctaaagcacaatctaaatatggacaaactgtaagtaaagcaaatttacaaccaggagacttagtattcttcacaactaatggttctggttctgttagtcatgttggaatatatgtaggtgggggtaatatgatacattcaccatcaacaggaaaaacagttagtgtaactagtataaattcatcatactatacagcaagatttgttacagcaaaaagaatattataatcggtttgtaatatgacaaattgataaatacataaatatatataaacgctctatattatatttaatttaatcatggaaacaaaaaatgattatattttaaatgtactatagagcgtttttgtatcactttaaatctaatcaagattcaagttaatatgactattaaataggagccttttcatatgatgattatttgcgcaatcccttgacaggatagggtaaaggtggtaagctactaacagtacaaaaatacttttaattttagttcagagaggctaaaaaaggaggacgaaagatgttaaaatcaagaaatttaatccaaccagaagacttttcaatagaagaaatagatgaaatattagaattagctcaaaaaataattgacaatccgtcaaaatattctcgtatatgtgaaggaaaactattagctacattattttatgaaccatcaacaagaacaagattaagctttgaatctgctatgaacagattaggaggacgtgtagtaggcttttcagagccaaattcatcctctgcatcaaaaggtgaaactctaggagatacaatgaggatagtatctggttatgttgatataatagctatgagacatcctcaatcaggtgcagcttcagaagcagctagatatacggaagtgccatttataaatgcaggagacggcaaaaaccagcatccaactcaaacacttacagacttacttactataaaatcattaaaaggaactttagaaagccatacaataggattatgtggtgatttaaaatatggaagaactgtgcattctttggttaaggctatggcaagatataaaaatacaaagtttgtatttatagcgcctgaagagttaaaaatgccagattatataaaagaagctataaagggacatgcatattatgaaactaataatttggatgatgttataggaagcttggatgttttatatatgactagagttcaacaagaaaggtttgaagataaatcagagtatgaaagacttaaaaactattatattttaaataaagctaaattagaaaaggcatctaaagatatgttagtaatgcatccattaccaagagtaaatgaaatagacatagatgtagatagtgatgatagagctgtatattttaaacaagctaaatatggaatgtatgttagaatggctttaataataaaacttttaggtataaatgaagactaatagttatcatataatagtaaaacaaaggagattttgggatgtataaaattctggaaaatatatatataggcgaagatatgtatagaatgaaagtaaaaggtaattttgaaggtaaaatgggacaattctatatgttaagagcatgggatacttatccagtactttcaagacctataagtatacatgatatagatgaagaagggataacttttctttataaagtagtaggagaaggaactcaaattttgagtaacctaaaggtaaatgataatataaaattagaaggcccttatggtaatggatatgctaaggttgatggaaaggtagctctagtaggaggaggaatcggtgtagctccactatatttggttgctaaaaatataaaaaattgtgatgcatatcttgggtttagagaagatgttatattagaagatgaatataagcaagtatgtaataaagtctatacaacagtaggaaatacttttgtaacagatataattgatgttgagaaatatgattatatattaacatgtggtccaactccaatgatggaaaaattagttaagatggtagaaggtactaaaacgagaattatggtatctcttgaaaaccatatggcttgtggagtaggtgcctgtttagtatgtacgtgtaaaactaatggaggaaacaaaaagacttgtaaagatggtccagtgttctggggagaggacgtgatttttaatgggtaatttaagtgtgaaatttggaagtgtagaatttaaaaatccagtaataatggcgtctggaacttttggatttggaaaagaatataatgagatttatgatatacaaaaacttggtggtataagtagcaagggtcttactttaaataaaaaacctggtaacaatggtatgagagttcatgagacaccatccggtatgatgaatagtgttgggcttgaaaaccctggagttcaaggatttatagactatgaattacctttttttagtaaactagacttagtcagaatagctaatgttggaggtgggacattagaagactacttattaggggttcaaatgttaaatgacaagcctatagacattattgaattaaatatatcttgcccaaatgtcaaagctggtggaatggcttttggtataaaaaatgaagtggcaagagaagttgttcgtgaggtaagaaacataacgaaactgcctttagtaataaaattatcacccaatgcagaagatattgtaggaatggcaaaagtttgtgaagaagaaggtgctgatggagtttcattagttaatacttttaaagcaatggcaattgatataaaaaatagaagaccagtatttgaaaatgtatatgctggattatctggaccagctataaaacctatagctttgagaatggtacatgaagtgtgtaaaaatgtaaatatacctgtaatgggaatgggcggaataactaaagccacagatgctatagagtttataatggcaggagctacttgtatccaagttggaactgcaaattttatgaatcctagaataggtattgaaataatagatgggattaatgaatttatggatagagaaggaataaaaagtttagacgaaataagaggaattatataaggtagaataaatagtattttaaagataaaaaatatagattaaataaacaataattttataacattaacatggaggaaaaataatatgagtaaagtagatgtagtggatatattaaagaaaagtgatgcattgttggagggacattttttattatcttcaggaaaacacagtaatagatacgtacaatgtgcaaaagtattaagatttccagaatatgctgctgaggtattaagtacagttgttgaacaaataaaagacttagatatagacttagtagtaggaccagctatgggtggagtaatagtttcttatgagttaggaagacaattaggaaaagaagctgtatttactgagagaaaagacaatacaatggagttaagaagaggatttgaagttaaaaaaggagcaaagataataattgctgaagacgttgtaactactggtaaatcaactatggagacaaaaagagtattagaagccttaggtggagaagttgtaggtgttgcatgtatagcagatagaactaatcatgatataggtatgcctatatatagtgctataaaacttgatattcaagtttatgaatctgatgagtgtcctttatgtaaggaaggaaaattaccagttgttaagcctggaagtagagagttcaaggaattagggatgtaataaaaacttaattatttatagtgttacttaaaaaatgtaaattttttagagtaaaaatttgtaatataacatataacttaaaaataaaaagcagttagccttataaatgaaggttagctgttttttttgttaaaaatatatttacaaaataagagatagtagcagtacaatataagtataaggtaaaagtattatatattagggaggggtaagtatgaaaaatcaattaaatgaaaatcataaaaaggttgtattttttggagtaggtgctgtaggagctacttttgcagaacaattttttaactctaaatatgattttaaaattctttgtgataatgaaagaaagaaaagatatttagaagaaggatttataataaatggaaaaaggtatgattttaattatgtaactaaagatgagtataaacaagaggctgattttataattataggtctaaaatataataatttaaaagaaaatataaaagaattagatggattagttggaaaaaatacagttataatgtctctgctaaatggagttgatagcgaagagataataggagaaagatttggaattggaaaaatggtatattcatatgttaccaatatagatgcaaagaaaatcaataataatattatacacactactaatgggataattgtatttggtaacaaagataatagtgaagatagaaaaactaatataataactgaagtctttgatgatgtaaatatagaatatattttatcaaaagatattcaacgagatatgtggtggaagtacatggttaatattggtgtaaatcaaacttcagctatacttggtgcaccttatggagtttttcagagttctgagcatttaagagaattagcaaaatctgcaatgagggaagttgttgctatagcacaagcaaaagacatatctcttacagaagatgatgttgaaaattcattacatagaatactagaacattcaaaagaaggaagaacatcaatgcttcaagacgtggaagctcatagacctacagaagtagatatgttttctaagaatatctgcaaacttggaaaaaaatatagcatacctactcctataaatcagactttattttatatgataaaagtaattgaaagtagattttaaagggtatttgtaagaaatattgataattattgattttaaattttattaatgttatatactatttaagttactaaatatttttaactcttcaatgaaaatagttgctgcttttgacaaagttatatcttttggaaatatatatgagaaatgtctgttgtagctgcttccaagctctatgacagacagctcattgtttaaaacaggtaagcttgtcactagattagaaactattgtaattcctaaattatttctaacagattctttgacagcataattacttccaaaaaccatcatactttttggaataatttctttaacacttaaaaacatatctaaatagtctctggttccagaaccatcctccctgactatccatttttggtcttgaagtttatcaaaactaaaatcttttaataaatgactattgtatggaagtgctaaaaccatcttatcttcaaaaaaatattcttgaataaatgaaggggaagagcaagtgccttcaataagaccaatgtctaaaatataatccttaacatgagaagatacgattgatgtattttttataaaaacttctacatatatgtcaggatacttttgagaaaataatgctaaaaaatttggtagaatatattctccaatagttaaacttgcaccaatctttaagtgaccagttatagcatctgaaacttggcttacatcatgataagtaatatttaaaagatttaatatttctttagctcttttgtacaatatttgtccactttctgttataaaaatggttttttgtttaatagacctgtttataagcacaactttaaaataattctctagattttttatgtgtttacttacacttggttgtgatagatttaagtattccccagctttagtaaagtttttgtattcaacaacagctacaaatgtttttaattcttcaaacaattttttgtctccttcacctaatgaaattttacattttttatatactttctacagataattatactatatataataaccattaaaaacattaatcattacgatattatatatttattttacttatggttattacaattatatactattgctatgaagaaaactatattaattataaggtaggtatattatgttaaagaaaaaaagcagtttgacattaaaaactataagggaaatattaccaggactgtttatatcagtgttagtaggttatattagtatatttatttctattttaattcctaaggtaggggcagcatcaatttctatatttttaggtatgtttgtaggaaacctatttttaaatcaaaaggtatttcaaaaaggttataaattttcagagacagatttgttatcatattcaatagtactattaggggcaacactcagtgtatctaccttaatagacttaaaagtttcaggaattttatttataatattgcaaatgacaataacaataatagctgcactttatataggtaaaaaactaggatttgaagaaaactttagatttctaatggcaagtggaaatgcagtatgtggttcttctgccataggagcaatagttccagtggttaatgcgacagataaagaaaagggaattgcagtaactattgtaaatgttactggtatattccttatgtttttacttccaataatatctcaatttttatatagccatgaacttgtaaaaacttcagcaatgataggtggaactttgcaatcaattggtcaggttgtagcaagtggagcaattgttggagaaaatgtaaaagatttggctactatttttaagatagtaagagtaatatttctagttgttgttgtattagtatttggacatatgaaaaatcagtctaatagggaaatccttgaagaagaaaaggatgagataaaaaagaaaaaagtaactataccatggtatgtaattggattctttataacttgtgcacttttttcaatgaacattataccaaaagaagtatctgtgttgtgcaaagaaataagtaacaaactagaaataatagctttagcagcaattggattaaaagttaatgtaaaagatttagtgaaacaagggaaagaagtttctttatatggtttatttgtaggtacagtacaagttgtatcagctgtagttttaataaaaatatttatatagcacaaaaatagtatttgtaatattaatttgattaattaaaataatatgatactaataatttataatataaataaaaaatgaatttcgataagtttaagtgggtataaacttatagaaattcattttttatttaaggtaaaaatttaaagtaaaatattattttacataataataaccttataaattttgaaattacttatctttgtgttaaaataagtaaaatacacatattaaagttaagtttttaggcaaataaacaaaatgaaaatataaatattaaggagatttggtatatgaatgtttatgaaaaaggtaatggagttatactagaaggagtaacagattttgacccagtacatatatttgagtgtggtcaatgttttagatggcacaaacaagaagatggctcatacactggagttgcaagggggagaatattaaatgtcaaaaaagagaatgataaaatatatttaaataatacgaatttaaaggagtttaacagcatttggtataattactttgatttaggaactgattatacagaaataaagaataagctaaaaaatatggatgaatatttgaataaggctactgaatttggatggggaataagaatattaagacaagatggatgggaaatgcttatatcatttataatttcctctaataatagaattcctatgatacaaagagcgatagaaaatttatcaagaaagtttggtaagtatataggtgaatatgaaggtaatgaatactatgcattcccaacaccagaagaactaaataaggcctcacaagaggaaataagagcatgtcaaacaggttttagagataagtacataaaaagtactacacaggcagttatagagaataatgatgaggtatctgaatatacaaatttaagtacagaggattgtagaaaagagcttttaaaatttaatggagtaggaccaaaagtatgtgattgtattgcattatttggtatgcaaaaatatgattcttttccagttgatgtttgggttaagagagttatgcaagaattttatatagatgaagacatgagtttacctaaaatgagaacttatggaatcgataaatttaaagaaatgtctggatttgctcaacagtacttattttactatgcaagagaactcggtataggaaaataaattaagggggagaaattatgggagtaataggaacaatatttctgttctatttaattatatcatatctagctggagccataatttctgtgattatattgcttgaaaatagagaccctgcaaaaacaatgtcttggctattgatgtttattatatttccaggtgtaggtttaatgatatatgctatttcaggtagaaatattagaaaaagaaaattatttaagactcaaaaactagctaataatataaaagaaaagaaactatttgatacattagaaaagataacagaaatagttgaattagaaaaagaatctataaaacaaaataagcttttaagagatgaagaggatggtagttatagaaaaagggtaataaatatgttgttaaagactggtatgtttccctttactaaaaataataaagtggatgtatttgtagatggaaatgaaaagtttaaaagacttatagaagatataagagaagctaaagaccatattcatttagagtactttatcatcaaagatagtgaaataggtagggtgttaaaagaagaacttataaaaaaggctaaagaaggcattaagataagaattttatatgatgatgtaggatgctggagattttggtttaatagaaaatttttccgagaaatgagggaagtaggtatagaaattgcagcatttttacctacaaaatttcctataataggagggaaattaaactatagaaatcacagaaaaattgttgttattgatggaataattggatatacaggtggaataaatataggagatgaatatttaggcaaaaatgataagtttggatattggagagatactcatattaggattaagggtatttctgtatacatgcttcaaatgacatttctgattgattggtattatacgacaaaagaagtattagtgactaaaaattatttcccaagtgtagggaatgttggtgaaagtatgatacaagttgttgcgagtggtccagacagtgactgggaagatattcattatgcttatttttctgcaatatgtcaggctagaaaaaatgtttatatagaaactccatattttattccagatgaaagtctactaaaagctataaagagtgctgctcttagtggagttgatgtgagaataatatttcctaaaattgcagaccacaagatagtaaatatagcatcttattcatattttgaagaaatattaagagcaggtggtaaagtttatttatataataaaggatttatacattctaaagtcgtaataatagatgataaaattgcttctgcaggtacagctaatatggatttaagaagttttatgcttaactttgaggtaaatgcatttatctatgatgaagaagttattagggtaatgacagatgatttctttgaggatttaagtcactgtgaagaacttaatttggaggtatttaagaatagaaatatcatacaaaaaatcaaagaatctgtagcaagattattttcaccaatattataaaaaattattaaaaaaggtattgaaaattatgtgtgattggtatattataataattgttagcactctattagatagagtgataataaataaaaagtatatatataaatctacatatataagtagtattaatttaaaaataactaaaaacataggcgaactagtctatacttaatattttaggaggcgtgaataatgaaaataagaccattagctgacagagtagtaattaaaaaagtagaagcagaagaaaaaactgcaagtggaatagttttaccaggagcagctaaagagcaacctcaaatagctgaagttgtagaagttggaccaggtggaatagttgaagggaaagaaataaaaatggaattgacagtgggagataaggttatattccaaaaatattctggaacagaagttaagatagaaggacaagaatacacaatactaagacagagtgatgtattagctgttattgaataaatatagaataaatttattaggagggatttaaaatggctaaagaaattaaattttcagaggaaacaagaagagctttagaagctggtgtaaataaattagcagatacagtaaaagtaacattaggacctaaaggaagaaatgttatattagataaaaaatttggttctccacttataactaatgatggagtaactatagcaaaagagatagaactagaagatagatttgaaaatatgggtgctcaattagttaaagaagtagcaactaaaactaatgatgtagctggagatggtactacaactgctacagttttagcacaagctataataagagaaggtttaaagaatgtaacagcaggggctaacccaatacttttaagaaaaggaatacaaaaagcagtaatagtagcggtagaagaattaaaaaatcaatcaagaatagtagaaacacaagaggctatatctcaagttgcttctatatctgctggtgatgaagaagttggaaaattaatagcagaagctatggaaatagtaggtaaagatggagttataactgttgaagagtctcaaactatgaatactgaattagatgctgttgaaggtatgcagtttgatagaggatttgtttctgcatatatggttacagatgtagataaaatggaagcagttttaaatgacccatatatattaattactgataagaaaatatctaacatacaagaattattaccagttcttgaacaaatagttcaacaaggtaaaaagttattgataatagctgaagatgtagaaggtgaagcattatctacattagtagtaaataaattaagaggaacatttgatgtagtagcagttaaagctccaggctttggagatagaagaaaagaaatgcttcaagatatagcaatacttacaggtgctcaagtaatatcagaagaattaggttatgatttaaaagaagctgatttatctatgctaggtagagcttcatctgttaaggtaactaaagaaagtactacaatagtagatggttctggagataaaaaagctatagaagatagagtaactcaaattaaacatcaagtagagcaaactacttcagattttgatagagagaaattaatggaaagattagctaaacttgctggaggagtagctgttgtaaaagttggagctgctacagaagtagagttaaaagaaagaaaattaagaatagaagatgctcttaatgcaactagagcagctgtagaagaaggaatagtagctggtggaggaactgcttttgttagtgttataccagcaataggaacactaattgagagtttagaaggagaagttaaactaggtgctcaaatagttaaaaaagcgttagaagagccattaagacaaatagctataaatgctggtcttgaaggtgctgtaattgtgcaaaatgttgttaattctgaagcagaaactggatttgacgcattgaatgaaaaatatgtaaatatgatagaagctggtatagttgacccaactaaagttagtagaagtgctttacaaaatgctgcatcaatagcaagtactttcttaactactgaagctgctgttgctgaccttcctgaaaaagaagatgcaggaatgccaggaatgggtggcggaatgcctggtatgatgtaatttaaaaaatttaaaatataaattttaatataaagaactatttcgacttagattttaaactctaagttgaaatagttcttttgtatatatctaatttttgtatatctataaattcaatacacatatttagataatcagtatctagtttgtaataatattttagagtagtattgttattttttaggttatgattttagatatatattaattaaggtataattgttgatagagaataaatcaaatttaaaaggatgcgataatatggacttaagaaaattacttgaagaagttaaaaatgaaaatattgatatagattttgcgttagaaaagttaaaagatttaccttatgaagaccttggatatgcaaatatagaccatcatagagaattaagaaatgggtatccggaagttatttattgtgaaggtaagagtgatgagcatattttagggattattgataaaatgaatcaaaaaagttctaacatattggggacaaggtgcagaaaagaaacttttctgaaaattaaagaaatctataatcatgctgagtacgaagaggcgtctaaaattcttaagattcaaaatcatgatatagagaatataggaaaaggtaaaattgtgattgctacagggggaacttctgatataccagtagcagacgaagcttatcatacagctaagtttttaggtaatgatgttgatagaatatatgatgttggagtggcaggtatacataggcttttaaataaaagacataaaatagatagtgctagagtaatagtagccgttgcaggtatggaaggtgctcttgcaagtgtaattggtggactggttgatgttccagtaatagctgttccaacttctgttggatatggagcaaattttggaggattagcagcattactagctatgttaaatagctgtgcatctggaatatctgttgtaaatattgataatggatttggagcaggatatttagcatcaatgataaataaactgtaaatacattgatataaattaaacaaaactatataataaaatttaatttctattatatttttactattaaaattgaggagacatatatgagtgaaaaaatactttattttgatataataagcggtatatcaggggatatgacccttgcaagtttattaaatttaggtgtgcctaaggaaatttttttggaggaaattcataaactaagaatgagcgatgaatttaatataaacatcagctcgaaaactgaaaatggaatagtaggtacaaaagtagaagtaattacaaaagaaaaacatacacatagaaatttagtggatatatttgaggttatagataaaagcactctaaacgaaaatgtaaaatctaaagcaaaaaaaatatttatggtaattggagaagcagaagcaaaagttcatggaactacaatagacaagatacattttcatgaggtaggggctatagattcaattgtagatatagtaggagcttctatattagttgacttactttgtgtagataaagtttgtgctagtacagtgtctgttggttcaggatttgtaaaatgtgaacatggaattatacctatacctgcacctgcaactatagaaattttaaaaggtgtgccaattaaattaaataatgtaaatggagaatgtacaactccaacaggagctgcaatcataaaagtcttgtgtgatgagtttgtagatgagcttgaattttctccaaagcaaattggatatggtataggtcataagaagtttgaagtaccaaatatactcagaactgtattaggtgaaaaaaaaaagaagaattaatttatgaaattagtgcaaacattgatgatatgtcttcagaaatctattcttatttgtatgaaaaaatattagatgagaaagcattggatatttatacagagagtatttatatgaagaagaatagaccagcaacaaaagtatcaattttatgtaatgaatcagatttagaaaagtttattaaaatattacttttagaaactagtacttttggagtgagatataatgcatataatagagaaattttagagagaaaatttgtaaaattagatacaaaatatggagtggttacagtaaaactagggtattataaaggaaaactagtcaaggttactccagaatataatgaatgtaaaactatagcaaaaaatgaagatattcctataaaaaaagtgtttgctgatataaattttagaataaaagaagaatttagtgaaaacttattgacataagtaataaattttgataaattaatattcagccttattaaataaaagtaaacagaaaaaaatatataaaatataaactcactcgtatatgctcagaaatatggtctgagagtctctaccaagataccgtaaatatcttgactatgagtgaaattattataccaaaagacctagttaagtaaatgtgtaggctgagttatactccctatgtgttggctataagataaaggtattttggaagcctgtatagtaatttcacttttgctagaaattatggaagttactatacaggttttttgtgtaaaaagatttaatataatttagactgtattgtgttaaaataaatatataaaaactatattatacaaggagagatgtgaatttatgaaacatgaattagtacttgtaatagattttggaggacaatataatcagttgatagctagaagagttagagaaaacaacgtatattgtgaaatacttccatgtactgcaagcatagaaagaataaaagaaaaaaatcctaaagggataatatttacaggcggtccaaatagtgcgtatttagaagattctccaacaatatcaaaagaaatatttgaactaggagtaccaatacttggaatatgctatggtattcaaataatgtctcatgtattgggtggagttgtaagaaaaggtaataaacaagaaaaggaatatggaaaaacatctataacttatggaaaatcatcattatttgaaggaataactacaaatagtgtatggatgagtcatacagatttaatagaaaaagttccagaaggatttactatagttgcaaatactaatgattgtccagtagcagctatggaaaatgtagaacgaaacctatatggagttcaattccatccagaggtagaacactgtttggaaggggacaagatacttacaaacttcttatataatatttgtaaagtaaaaggtgactggactacagattcattcatagaagataaaataaaagaattaaaagaaaaaataggcgataaaaaagctttatgtgctttaagtggaggagttgattcttctgttgctgcagttcttattcataaagcaattggggacaacttaacttgtatatttgttgaccatggtttacttagaaaaaatgaaggaaatgatgtagaaagaatatttagagagaaatttgatataaatttaataagagttaatgcagaagatagattcttatctaaattaaaaggagtttccgaaccagaagctaagagaaaaataataggtgaagaatttataagagtatttgaagaagaatcaaataaattaggaaaaatggatttcttagtacaaggaacaatctatccagatgttatagaaagtggacatggaaatgctgctactataaagtctcatcataatgttggtggaatcccagaagatgtagacttccaagaaattgtagaaccattaagagagttatttaaggatgaagttagaaaaataggattagagcttggtatagaagaaggattaatatttagacatcctttcccaggaccaggtctaggaataagagttataggtgatgtaactaaagaaaaatgtgatatattaagagaagctgatgctgtttatatggacgagcttagaaaagcaggtttatacagagaaatatggcaagcttttgcaacattaccagatgttaagactgttggagtcatgggtgatgaaagaacatatgcttatttagttggtttaagagcagttacttcttctgatggaatgacttctgactggtataagatgccttatgatgtattagaaagaatttctaatagaataataaatgaagttgatggagtaaatagagtagtttatgatataacttctaaacctcctggaactattgaatgggaataaaatatagaatgccagaaatccacatgaatacaggatttgaggtctctcttacttctatattatactggtttgatactatcaatatttgccagtatcttatggattaataagcaaaaaacatcctgctgaatggtaaattcggcggggtgtttttattttgttttgaaactcctttgctctgaaactcgaagtatttaacactgatgatgttgttatcttttagttccttttgtgtcatgctctgaaagacaaattgatacaataaaaaagtaatttcttaatcattgatggagatatgtatttatgttactcttgatggtaatttgagtaatattgttcatagctttttatattcacttaattagaaaaccatttggtataatcataaataaacttgatgatataatagaaaagatttataattattagaagtatataaaagtattttatgtctatgaaatgtatgtctataaaacatatagatgacttttgtatattaatgtatgaatattgatattatagaagaattgagttgtcaatgatactaaatcaaatatttatagaagatggagggattatgagaaataaaataattataggaattactttttcacttgtattactaatgtctggatgtgcttcaaaacaaacagcagaaataaacgtattagcaactactgatttacatggagttataccttatgagttaacttcttatgtaaaagaagaaagaaaaaaagataaaaatctaactttagtagatgcaggagatttttttgatagtggagaagtgtttggttctagcatggatagttattttagtgctagatataaagatggtgataataacactgaaagttatattgagacgcctatttcaaaagatatgaaagaggtaggttatgatgttgcagttcttgggaatcatgaatttatatccaacaataaattttatctagataatatgatatctgattttgagaaacaaaaaataaatattttatcggcaaatacgtataaaaaaaatggagatagttatacaaaaccatacataataaaaaatattaatacacctgaaggaaacgtaaaactaggaattttagggcttactataaaagaagttggtgagaggaaacagtggaaagatggaaaacttgttgactctaagtctttagaactaaaagaccaagagggctacaatggtgaattgtatatgaatgatttagtagaagatgctaaaaagtgggttggtataatggaaaaagagaagcctgacattatagttgctgtggcacatacaggtgagaaacctaagaaacctagaaacccaggaaatagaatacaagacttagctcaacaagttgatggaattgatgctatagttgcaggtcataatcatgttcaaattgagcaacatgattataaaaataaatcaggagaaaatgttatagttactgagccaggaaagcatggggaatatatttctaagattaattttaaattagaaaaaaacaatgataaatggaatatagttgacaaatctagtaaattaattaaatttgaaaaaaatcaagaaagtgataaatttggagaatttatttcttcaattaataaagtaagtaaagataagaaagaaataagattatcagaagtaaagactcctgaatgggataaaatatatgtttttaaatctggaacatctgcagatgatatatataaaacaataggatataaatggagaaatatatcatctccaaagggtgatgacatggtgcagattgttgtaatgaataataataagcctgttagctatatatatggtgaagctgaagttatgccaattaatataaaatgtgatgaatcagagtataaaaataatgttgtaactatttatcctaataaaaatgataaatttaaaattgaaaaaggtaagcaagaatatagtattaatttaaaacatatacaatagaaacttttatcttatttaagtttagattgtacttaaaataaagtgtgtattattttaaaaagtgatgataattaaaatcacaacattaaggaatagtacacactttttatgctaaaaaatagaatgttaaaaaattaaacctttaaattaaagtacattgcttatattatccaatattatttccaaaggttgtgtaatatttttatccttatgtaatattgctaacattttattttccatatctatctcatctaattcaatcaatcgcaattttttatgtaagagtgaatctaataataaattttctggcaaaatggttatacctaaccctgcttctgcagctttaataagtgcaaaagaattaacactttcccaaacaggataagctttttggtttgaaagagataatacactgtccaaagtatcgcgaatagcacttccttgttcacgtaacaataacggaaacgtgcataactgtcgtagagataaggtttgttcagataaaggaaaagttggagcacatgcaacacataacttataggaacctaataaaattgtacggaatgccccctgtggttctataccttcccaaaaacatatatcagcttctccactttttaaaatatccatagctgaattagcactttcgacacgtacattcactttaagagatggaaatgaattttttagtcgacttaaaattggtggaagtaaaaaagaggcaattgtaatgctagaaacaatgtttataggtgtacattcttctaaacgactgatttttttgtctaaattgcgacaagcagttaagatactacgtgcttcatctaaaagagaaatgccacagcgagtaagacatacccctcgtggtaatctgtcaaatagtgatgtttcagcttgttgttcaagttcagctatagcatgagatacagcagattgtgtgatatgtaatttttttgcagcacctgtaaaagtgcctgtttgttcaattgcttctaaaatctctaaatatcgtatgtttatcataataaatatcctcactatacatgaataaaattaattaattccattaaattctatcattttacagattgcaaagcaacaggtatactgaataatatgaagtgaaaagaaggaggaatattttgaatcaaagcagaaaaatatatttttggcttttaattattaacttgtttattagcacattcacttttggcggagggtatgtagttgtacctatgattagacgttattttgtaaatcaaaagcaattctttacagaagatgatttgatgagtatggcagcagttgcacaatcaactcctggagctattgcaattaatttatctgctttggcaggttatcgagtagctggtactttaggggttgtcattagttgtacagcagctataatacctccactcgttattcttggattagtatcagcattttacaccacttttatatctaatgccattgtaactgcagtattaaaaggaatgcaagctggtgttgctgcactaattgtggatttgattattgacatgtgctctatgatattaaaacaacgttctttgtttttatcaactatgatacctattgctttctttgcaaactttgtgatgagtataaatgtaatttttatattatctgtttgctgttttgtatgtgtaatgcaagttttctataagaagagggaaaataaatgaatacaatttggaacttattttttatatttttaaaaataggcttgtttagtattggtggtggttatgcaatcatacctttaatccaagagaaagtagtaaatcaaactggatggataagtgagaaaatgtttacagatattataactatttcacaaatgacaccagggccactggctgttaatacttctacttttgttggacttcaaattggagggttttggggagcagttgcagccactttaggttgtgtattatgtggtgtagtaatatctctatttttatataatttttttcaaaagcatcagaactctacttatatatttgaaatattaaatggtctaaaatcagcttcattaggtttaattatctcagctgcggctacaattataatccttgcattatttgggacgaataaagtgtacttcaattctatatttgagatgctaaactggactgcactaataatcttttttgttatactactgatagtacgtaagtggaaaattaatcctattgtgattataataataagtggtatactaggaatatttttttatttataagtttttggtaagtaaaggatatctatttttttatatcttaaatccaaatagccaataaagtaaggctatttggatttttaataaattctgaaaagataatcagaaacccatataacatttaaattatatcactggttttctacaaaccaatcataagcttcttggcaaaatttctcactatctatatagtaactattatgaacattattaatttcaacaagtttctttttacattttagtgaattataatagctatcaaaatattgggttttaaaatatctatcatgaagtgttttaaagacaagagtaggtatgttgactccatcttttatcttactatcttctgcaataaagcattctaacattgtattaattatctttgtactatttttccaaatatgaggatttttcttttcaaatattttataaaattcattatcatagacttcattataacctttatatttaggtggttttactgttatgtgaaaattaggaagaaacttaaagaaaaaatataataatttttatgttctgttttatatattattcatattttatcacagataatatactaaagttaatttttttattgtacaactattataataattcttctataatataagacattctataattttatatttaagttcatgtgtatttaattgtttttatataaaatgtccagtaatactatttggatttatttttatttcatcaggagttccagaagcaacaatttcccctccatttattccactgtctggacctatatcgataatccaatcagaagcacgtataacctctgtattgtgttcaataattaaaagtgaatgctgttcatttacaagttttctaaaagtaatcaacaaattttctatatctttaaaatgaagtccagtagtaggctcatccaatatgtacagcattcgttttttagtttttgtccctaattcttttgctaattttatcctttgagactctcctccgcttaatcctaatgtattttgtccaagctttagatatccaagtcccacttcatctaataaggagagttttctatatatatcagagcaatcactaaaaaatgtttttgcttctgctacttccatgtcaagtatatctgcaattgtttttcccttgtattgtatagacagtatttctttttgatatctcttaccttgacattcattacaagttacccattggtctgccatatattgtagaataatttttgttttacctaatccttgacagtttgggcattgcccctttttgctattaaagctaaaatagctttcatccaataatttttgttttgcttgtggagtttcagtaaatagagaacgaatttcatcaaaaatattgatatatgtagcaggtgtagaacggctagattttccaataggtgtttggtccattaagataaaatcgtcaatagcatcaaatccagtaagtgcagtataatttttatttgggatagatttttgtttcaatttttcttctagagcaggaagtaaactgtgaaatacaagagaactcttaccagaaccactaacacctgtaatagagcacatacagtttaagggaatttctacatcaatattttttaagttatttgcatggcatccctttaagcttaaccatttacttggtataattttattttgtgaacttatcttattgtatgtactcaaatatttgcctgttatagaatttggattttttataatttcttgggttgtaccttctgcaatgatgaagcccccttttgtaccagcatttggtcctacatcaataatataatcagcagacagtattgtatccttatcatgttccactactataacagtattacccttgtctcttaattcttctatcattttgatgattagattatggtctcttggatgtaaaccaatagatggttcgtctaaaatataggttaatcctactaattcacttcctagctgacttgataatcgtactctctgcagttctcctccagataaagttggagctgttctatctgttgatatatagctaagacctacctttaatagataactaactcgaatttttaattctgttaagatatcatttaccaaagatagctcatttttttgaagttgatttggtaattcacacaaccaattccataactgttctatcgtcatttttgttagttcagggaagcgataacctttgattgtagtgaatctagcctcaatgcacagcaattcgccaccacatgtattgcaaggaattttgttcatatattgatgcaaggtattattttcagaactagattctctaaaaagtctttgaatgtggttgattgctcctgaagcaggccttctaatctttgattctcgtccctttgattcaaagctaaattcatatatcttatcgtctgtaccatataagattgcatctataaaatctcttggcaattcattccaaggtatatctaggtctatatttttatcttttgctattgcatataattcacctaccatccaattaccatttggctttttccccctcaattttccaaaatagtaagtagctccatctaatattgaaatagttgggtcttttacaattaattgaggattaacttgataggtaaaacccaatccattacaatcgtgacaagctccagtatgggagttagcattgaaggttgaagtatttatcttagaaaaaatagtttggcaatgtggacaataattttttgtattattctttttttctaatggagttttgcaatatggacagtaactttttccgattgatacaaataacattcttaagtaatcccaaatgcttgtaagagtaccaacagtagaacgaggattttggcttccttttttctgttcgatagctatagtaggggttaatccctgaagtaaatcaaattccggtttttgaagctgttctgaaagttttgctccattacctagattttcaaaataacgtctttttccttcttcataaatcgtatcgaaagctaaagaagattttccactaccacttacacctgtaataacagttatttgattttttggaattgtaacctcaacatcctttaaattgttttgccttcctccttttagatagatagagcttttattatgacaaagtgaatttttaattgatttatttattgcttttgcaaatttgaatttcttttctagttcaagaggattgcctaattcttttatttccgaaatacctaatatttttaactgagaaaagattgatttcaaataatcttcaggcaatttttctattaacaaattaaggtcttctatttttatatttccgcttgataatatctctgccatttcatctaataaatttttttctgctcttgttaattgattgtattttttggaacttaattctgtccataaatcccatggaagcaattctaaaccaatcatattattaaagtcatgtagaagattaccctttacagaatgccaacctttccaatttttattatatccaaagtcatctggatgagcatgtccttgtcgacatcttatccaggcttctgaaccagttaaaaaaccatctgtttttccgacatcatgagtgtcaaaattaatttgaaaataatttttttgtatgtcatctatttgtgcatctattcttatccatctctttgttagagtatcatagtattctacaagccagtggtcttcataagtaagctcattttcaaaataattagcaaaacctgctctcattctagcctcaaaacctcgatatcttaggagcgatacaagaagtaaagaataatctctgcacattccaacaagcctttgttttgggtttcttggaatagttagtgggttagaatttatttcaaatattctttttaacatttgaggaattgtacgaagcaattcctcatcagattgttgcttattaaaggatataccatataattttccttggtctccatgaattactaggctttgaaccacttttaataactcaattggagtctttggtaaatcttgatatttattttcaaattttttaggatttgtgatgatgctttgatttttatagttatttattttcatttatatttcacctctctaaatggatgatataccctgacatggtgtcatatgcaaggacaatttagattttttggccaaaatttaaaaataaataaaaaatgatacagtgataaattgtaatacaaatatagtttcaaattgcatataatataattatttaataaaaccattatctatggaatgttaatgaaatgttaagatggcattcttgaatattaagaaatagaatactataatatagtgtgaaggattcttagtaaaaaaatttgtaagtgttaatatacattaaaaaataggtttataatttggaggaaaaaaatgaaattatcaaggtataagaaaaatagtttagttctgtctataattttatgttcacttattatttcaatccttgtaattactgtttttaataccgtaaaactacacaatatatctaataaacaatctaaaaactatttaaacgatgtatctacacagattgtaatgaatgttgattctaaaatcaaatttattttatccgacttaagaataatggcagattttattaagcaatatgaaggtgatagtcgatatgagtatttatctaaaagaaagactagttataagtattatgatgttggaataatagatttagaaggtaaagctgagtttttaagtggaaaaaagtttgacttaaagaatactgcttcctataaaaaaggaattgaaggtaaagaatactcagaagtaatagagtcaatgggttttgttctttatagtgtacctatatttaacgataatcatgaagtgtctagtattttaataggtgtatccaataaagaaagcatggatgagattcttaatatagatagctttaatggagaaggaactattgaaattattaatagtcagggaaaaactcttttcataggaaaaaataatgagttaataaaagaccttagctataagtataaggattctgcagatgaaccttgggcacaaaagatgcttaatgattttaaaaatgataaatcaggaaatattacaataacctcatcaaaaggtgtacaatgcttattaacttatcatccaattacaagaggtttaaatgattggcattttcttctcatagtacctgaagatgttgtacttggtgaacttaataagttaaattcttttacaataataatgacatttataactacatgtattattggaattataacattaattttatatattataagaagaaaatatgtaaatcaaatagaaaatattgcatatttagatagtataacaaatggtataaattcaactaagtttagtatgctagtcaaacctttaatttcagaatcacctgatagtacttatatgatgatagcaatgaatataaaagattttaagctaataaatgattgtttcggtagtgaaaaaggaaatatgacactaaaacatctttacaatattttgtataaaaacattgatgaaaatgaagaatttgtgtgccgtcatgatgcagaccttttctatttgcttattaagaatagaccagtgttagaagccctggagttattatataaaatagaagctgacacaaattattttaataaaaatagggaaaatccatactttttaagactatcagtaggtatttacacaattgaaaatcataatgaagatttaattacaatacaagaccatgcaaatacagcaagaaaaagctttaataaaactcatcaaagtgatttttctttttatagtgatatagaaagaaaacgattaatatctgaaaaagaaatttcaaatttaatggaaaaagcccttgaaaataaagaattttttatgtgcttacaacctaaaattgatataaaaagtggaaaaattagtggagcagagtctcttgtgcgttggaaaaattcagaaaagggcataatttatccaagtaattttattcctcttttcgaaaaaagtggatttatatgtaagttagatttatatatactagaagaaacatgcaaattgatttctaagtggataaaagaaggtaaagaagtgttgagaatttctgttaatgtatcacgtcaacatttgaatgataaattgtttttagaaaaatataagcatatatgcaataaatacaatgtaccaacatgtctgatagatttagaacttaccgaatctattttcttagaaaatccagaagctatagatataatagaggatattcattctaatggatttaaatgttctatagacgattttggatttgggtactcatcattagggatattaaaggattttaaagttgatataattaagttagaccgttcattctttgttagcaaaaataatatagaccgtggtaaggtagttattaagtctattattgaacttagcaaaaggctaggtatgaaagtaactgctgaaggaattgaagaattagaacaagttgagttcctaaaaaatgtaggatgtgattatattcaaggttatgttttttctaaaccattattaatttctgattttgaaaattttgcatatgaaaataataaaattaaaaatatccattattaaatgtacaagataaaaaatttaggcaagttatataattaaaaatataacttgtcttttttatttatatatttaataaaaatatatttgcagattttgtaaaaataattttcaaatgttgtaagttgtggctaaagctttattgtattattctgaatatagaaagatagttactgtcttagataaaaactgaaacatacataataatataaaatttgctatattaataactctaattattttggaaggagggaaaatatgataagtgggagaatgttactcatcatgaattttctaaaaggaaaaaataagacaagttacaaggatattagcaaacaacttagtatagaagaaagaaaagttagatatgatataaataatttaaatattgttttgcgttcattaaacaagtcagtaatacaaaagatgaacaaaggtgtgttaattattcctgatgacttccaagtagtatgtataaataataacgaatatgtattttccttaactgagcgagtatctattatgaaaattatatcaatgtttaaaatagataatctaaacttagaaaaattgagtaaagaatttcaggtttctagaagttcaattaaaaatgaccttaatgttttgtcaagtgaattagaaagaaaccaaataactattacttatgataaatcttttaaaataagtggagaagaagaccttatatataagcaaagattgaacatattaaaatcgtattcttatctttttggtaaggaaaaatctgatttaagtgtatttgagaagtatttagtgaatgtaattgaaaaaatattcaaagggatttatttgattgatatatataattggtctatgaatttattattgcaaatgggatggactttaaatgatgaatcttttacatggtatgtgtcaaacattttcctttttacatggtatatacattcagatgaaaaacatcctttagaatctgcttcattaagtgagccatgttttgaaaataagtttgaccaagaatttgaaacaattattcaaaaaaagttgactaaggaacaaatttttctgttaaagagttttgtattttttacaaataaatatgcaagtttaaacgaggatatggatttgattagtacagaaattatagttcaagacctaatttacaatatgtcagaaatattagagattagctttaaagaagatatgattctttataaaggattactcaatcatattgccccattgatagagagaatcaagcagaatatacagatttatgaggaattacttcatgtaataccagataaatatcaatatgtacttgaagctactaaggtttctattcaaaaaaacagagttttaagtcaaataaagaatgaaaatgaaataatacttttggcaatacatttcttaggaagtatacatagaaatgagaggaataactacaaaaatatattgttagtttgtggatttggatatggtgtaattgctatgttaaaggatagtttagtaaatgattaccagataaatatagtagagagtattccatcatataagttacaagattataaagaatgggaaagtattgacttcattataacaacatcaaagatagtaatagacttgcctaaaacaattattgagataaatccatttttacaagaagaggattatttgaagtttgaagaaaaagggataaaaagaaagaacgtcttaactaattatatgtcaataaaaaaaaggttggactttttagaagaagatgctcaaaaaagagtattaagtattatatgtcaagaacttggatacagtgatgagagaatattatttagacaacttaatttaagtgatttaatagggattgataccataaggataattgatgaagatatgaaatgggaagatgctgtaaaaattagttcaaacatacttgctaattgtgattttgtatcagcacaatatgctgagaatattatagatattttaaaaaatgtgggtttttatgctgtaaaagataacgaatttgctttactacatggcaatgatagttcattagtcaaagtaagttcgataagtttattaatatgtaaagaagcagttagttttggagataaaaaggttaaaatcatattttgtctagcaagcagagataaaaaagagcaaattcctgcaataattaatctaactaaaatggtttataagactaattttattgctatgttagaaagtgcaaagacaaaagaagaagcagaagttttaattcataaatatgagaaggaggtcactgtatgaataaattagttaatgtaaaatgttcatttaaaatacatgctaattcaaaagaagaagctattgtatcgttagttgatgtagtatcaaaagaaggatatctaatagataaaaatcaatttttggaagatgttttaaagagagaagaaacattgtcaacttatattggacatggtataggtcttcctcatagtcaaagtgtaggtgttaaaaactcttgtattacaataggaaagcttgatattcctattgaatggacagaagaaggagaaaaagtggatttaatatttttaatatcagtaacaaaagacaatgaaaataatcttcatttaaagattttatcaaaattagcacgtttattgatgcatgaaagttttagaaatcaaattagatgttcagatgaacaaactgtttataatcttataaaagaaaaaatagaggaggaagattaaaatgagaattttaaagtttttgcaaaaacatcttatgacagcaacatcttatatgattccatttgtggttgcaggaggaatattatttgctttatcagtaactctaagtggacaagctgctgttcctgaaacaggctggttggctaaactgaatcaaattggagctgctggcttggctttattcattcctatattaggtggatatatagcatttagtatggcagataaaccaggattagctccaggtatgataggtgcatatttagcaaaagaagtaaatgcaggttttataggtggtatcatagcaggatttatagcaggatttgttgttttacaattaaagaaaattaaattagctcctacaatgagaactttaggttctatatttatttatcctttgattggtacattgattacaggtggtataattgtatttttaattggagaacctatagcttcttttatgacatggatgacaaactggttaaatggaatgtctggtgtttctaaaattcctttaggtggaatcttaggaggaatgatagcctcagatatgggtggtcctataaataaggttgctgctacttttgcccaaactcaagttgacacacttccatatttaatgggtggagttggcgttgcaatttgtatacctccaattggtttaggattagctacattattgtttccaaaaaaatttagcaaggaagaaagagattcaggtaaagcttcgctattaatgggatgtgttggaattacagaaggagctattccatttgcaacatcagatccagttagagtaataccttgtattatggctgggtcgattataggaaatattatggcttttttattaggatgtttaaatcatgcaccctggggaggtctgatagtattacctgtagttgacaataggttggggtatattgcatcagtattaactggagcagtagttgttgcagtattaatgaaattagtaaaaaaagacgtgaaagaagatgaagaaattgaagaggatttagatgaatcaattgaattaatatttgaagaattataaatataaatggaaggaatttgtataaaaaagtaaatataaaactataaacttaaaggagataagaatatgaaaattgtagcagtaacatcttgtcctagtggagtagcacatacttacatgtcggctgaatcacttgaattatcggccaaaaaatttggtatagaaataaaggttgaaactcaaggaagctctggaatagataatgaattgtcacttaaagatattgatgaagcaacttgtgtaatattgactaatgatgttgagattagaaatatggaacgttttaagggaaagaaggtagtaagaatgagtgtatctgagataattaagaaatctgatgcattaattaagaaaataaaagatacttttcaataaaaattgatttattttacatataactcaaagatgtttttaaagaaatttttattaaaagcatctttgaaaatatcttaaaaatagaataaaaggagatatagtcatgaaaaaattaccaataaagactgtcgtacaaagattactagacttacaagaagaggggaaaagtgcaactcttttaggaattggtcctatgtcaccaaacttgttacaagcaagttttgaactagcaaaagatgatgattttcctttaatgtttatcgcaagtagaaatcaagtagatgcagatgaactaggtggcggttatgtaaatggttggaatcaggaaacttttacaaaagatattaagaagattgccgacaaagttggatttgatggtttatattatttatgtagagaccatggtgggccatggcaaagagataaagagagaaatgaccatttgtctgttgatgaagcaatggagttaggaaaaaaatcttatttagcggacattgaagcaggttttgacctattgatgattgaccctacaaaagacccatttgaaattggaaaagtaattccactagatgtagtactagaaagaactgtagaattaattgagtattgtgaaaacgagagaaaaagacttaatctaccagacataggttatgaggttggtacagaggaaaccaatggaggtcttacttcaactgagacgtatgaaacatttataactagactaaaggttgaacttgataataggggtttgccaatgccaacatttatagttggtcaaactggtactttaactagaaagacagaacaagtaggaacttttaattttagaaatgcttatgatttagctcaaatggctaagaaatatggagttggtttaaaagagcataatggcgattacttagatgatgtaactttattagaacatataccatctcaaattattgctacaaatgtagctcctcaatatggtactgaagaaactagggcatatttaaaattagcagaagttgagtgtaaattagaaaaagagggcctagttgataaaacttctaatatcagacatgttcttcttgttaatgcaattgaatgtggacgttggagaaaatgggtagtaggagaacaaaaaaatctaactactgaagagatatttaagaatgaagttttatctaatgaaatactagatattgcaggacattatacatttaataatgatgatgttaaaaaagaaatagaagtgctttatgataatttaagtaagaataatattgatggtcaaagatttgttgtagaccatattaaacgtcctttgcgtgattatgcagaatgctataacttaaaaggtgttactacgaggattttaaataaataataggacttatagtggtgagtattgttatactaggtatttatagttataattatacttaccactattaaatttaggaggactaatattttgattaatttaatttttgatgtagatgatactttatataaccaattaacgcctttttacactgcatataataaagtgttttcttcaataaaggatatttctattgaagatttatatatgagtagtagaaagtatagtgatgaggtatttcatatgactgaaaatggagaaatgccaatcaaagaaatgcatatttataggataatgaaagcttttgaggagttgggaaattctattacagaaaaagatgcacaaagttttcaagatgagtatatatatcagcaatcacaaattacactaataccagaagttgagaggattttaaatttttctaaagaaagaaatattaatctaggaattataactaatggcccatcaaaccatcaaagaatgaagttaaagcagttaaatattgaaaattgggttgataaaagtaatatttttatttctagtgaggttggattttctaagccagatactaatatttttagagtagctgagaatgttatgaatttagatagagaaaatacatattatgtgggtgattcttatagaaatgatgtattaggtgctaaaaaagctggttggaagagtatatggttgaaccatagaggacatgaggtagaagagttgttttataaacctgattttgtaattttggaacataaggatttgatatctttatttataaaaatatgtagttataaaaatatgtagtaaaaaaatgttaataatagaattgtataaaataattaataataactatataaaattatatgtttagattgtgagcaatctattttatgttaaaaatagattatttagaagaaggggaaatcttaaaaaaatttgaatatcccctttttattatttaattaaaatgaaatagttagaaatatattttatttagtttagtcaataacattttgggattctttataactacatgttaactgttgaataggcttatcatatggtttaacccatcctttattaatacttaattctgtaagtgctgtgtgaccttctaccatttgagttagtgaagctgaatatatagctcttaattcaggtgtactacttgttaatgcagaattaagatacatattggcagatgctttagcagatgaaagcatacttaacattattactttatcgtctatataagtattgttcttaattagattttctatcatatttctcatgttatctatacctcctcagaaattagtatttcattttcaactataaattgttgtatagctttaattcttccttctgttgctaatatactagattctgattgtctttttaggtcttcatctgatattaacatatttattgctctttgcataagtaatccgtcagactccatttttataactgctgctaaagatattttttcagtttctgaaagtgttctcatttaatcatctcctatattgtaatttatgctttaatagtatgtctttcttttcaaggaaataaccattacacttttttacagtattttatattctctttatatcaaagtttagtcaacttaatatattaatataattttgtaggatatttatcattaaatatctataaaataaattatttgaatattcataaatcaaaatttatttgtatgtacttcttcaagagtcaatatgaattttttcaaaaaattaattttgatgataatcattaagggctatatttttcctaaagttgtgattatcattattaatttactaaaatactttaatgaaaaatagctaactttaattgtaggatattcttaatatatttgaaataaataaaaatattgaaggatataatattcaattggtatataaataataaatgatagttaagatttaccttagaggctaattaggtgttcagtcaaaattaatgcctttagaatacaaatgtattctaaaggcatttttactatgtattttcatttatattactaaacattatctatttttatatacatttctatgtattttattttcatcaaatcggtctataaattcatttttttcttcactatatccaatagatataagtgcataaggaactaattttactggtaagtctaaaatttgtttaactttatttactactttatttttaggaaatactcctgcccaacaagcagctagaccttgattagtaacttctaataataaattttgtgtgcaagcacctaaatcttgtatccatttaccaggttttaagaatttatctctatttccaagcactactatacataatggtgcaaattctatatgctttgctctatgctgtgactttgagagctctttcagcagttccttatcatctactataataaattcccaaggttgagcattttttgatgaaggtgcttgcatagctgattttagtatttcagttattttatcttcttctatatttttatctatatatgttcttattgaacgtctattttttataacttctaacatacagattctcctttaaataaaattatttctatttatataatatcattactttaagttttagctattacttatataaagaataaactttgtgttggttttatctaagtaaaagtaacattcagaactaaaaaacaagactataaatccaagatattaattaaaaaagaagtaataaaaaataatatacaagatttaaaaaagagtattgagcttaaaatttaattagaaaaccaattttgagataatctgttttttattttaacaaaaaaacataaataaagttcgatacgtagcgaatgaaaaaaatacaagaaatattttttttaaaaaatttcaaaaaagagttgataatatatgtatattaatataaaatttaaggtgtataattcgtataataatacgaatgatttgtagtgtaaaataacttataaacggagaggggaagtctaatgaaagtagcagtagttatgggttcaaaatcagattatccaaaattagaagaagggataaaactgcttgaaaaatatggaatagaggttgtagcaagagcattatcagctcatagaacaccagaacaactttcaatattcctaaaagaaatagaagatgatactgatgtaataatagcagcagcaggaaaagcagcacacttaccaggtgtaatagcttcacaaacattaattcctgtaataggattacctattaaatcatcaactatggatggactagactcacttttatcaatagttcaaatgccaaaaggaatcccagttgcaacagttacaatagacttaggtttaaacgcagctttattggcattacaaataatgactttaaaatacccaaaattaaaagaggatttgaaatcatatagagaagagatggcacaaaaggtgttagaagacgacaagaatttaagggggtagcagaaatgttattatatgaaggaaaagcaaaacaagtatattctacagataatgaaaatgaatatgttgtttattataaagatgatgcaacagcatttaatggagaaaaaaaagcagaaatatcttcaaaaggtatactaaataataagatatcaacaataatctttgaaatgttaaaagaaaataatataaatactcactttataaaaagtttatcagatagagaaatgttagttaaaaaagtagagattttaccattagaagtaatagtaagaaatattgctgctggttctatctgtaaaagagttggtcttgaagaaggtgtagttttcgatgagccaatttttgaaataagttacaaaaatgatgcttatggtgacccaatgctaaatgatgattatgcagtggcaatgaagttagcaactagagaagagttaaaattcttaagagaagaaactttaaaaataaacgagttactaaaagcatttttcttaaaattaaacctaaagttagttgactttaaaatagaatttggtaaggattctgaaggaaatataatattggcagatgaagtatcaccagacacttgtagactttgggatgtaaatacaaatgaaaagttagataaggacagatttagaaaagaccttggagaccttgtagaaggttatacggaagtactttcaagaatgaataataaataggaggcaaatgtatgtgtggagttttagggatttactctaataaagatgtaactaaagaactatattattctttatattctatgcaacacagggggcaagaaagctgtggtttagctcttttagatgatggagaaattaagtacaaaaaagatatgggattagttggagatgtttttaaggaaaatgaattatctaagttaaaaggaaatatagggattggacatgttagatattcaacagctggaggaagtcatgtttctaactgtcaacctttagttggaagttgtagaaaaagacaattagccatagctcataatggaaatctagttaatgcaaattatttaaaagatatgctagaagaagatggatatatgttccaaactaattcagatacagaagtgattttatatatacttgctagatattacaaaggggatatagtagaaagtttaaaagtgacaatggattatataaaaggtgcatatgctcttgtaataatgagtcaagaagaattggttgcagttagagacccacatggattcagacctcttgtacttggtaaaaagggtgatgaatatatatttgcatcagaaaattgtgcaatagatatacttggcggagaagttataagagatgtagagccaggagagataatagtagtcaaagatggagaactaaaatcatatttttattcagaaaattataaaccagttaagaaaagttgtatatttgaacacatatactttgcaagaaatgatgcaactatagacaatgtaaatgcatatgaatttagaattaaatgtggtgagagattagctcagaatgaaactgtaaaggcagatatggtagttccagttccagattcaggttggccaggagctattggttatgcaaatgctagtggattaaaaataagtgaaggcttagttaaaaatagatatgtaggaagaacatttataaaacctacacaagaagaaagagaaatagcagtaaaaataaaattaaatcctctttcaacaataataaaaggaaaatctataattttagtagacgactcaattgtaagaggaactacatctaaacaattagtaaaatctttaagagaagcaggagcaaaagaaattcatcttagaataacttctcctccagtagcttactcttgttactatggaatagatactccaaatcgctctaaattaattgcatcaagtaacaacgtagaagaaatgagagaatatattggatgtgatagtttaaaattcctagatatagaaggaatgttagatgcaacagaacataagtctactttctgtaaagcttgttttgatggagaatacccagttaagaaaattgataaggaggaactactttcatgttaacatataaagaatcaggtgtagatatagatgaaggaaatagagcagtagaccttataaaaggtaaaataaaaggaacttatgatggaaatgtagttggagatttaggtaacttcagtggattatacagtttaaaagattttgtaggtatgaaagaaccagttttgcttgcatctacagatggtgttgggactaagttaaaaatagctcagatgatggacaagcatgatactgttggaatagatttagttgcaatgtgcgtgaatgatttaatttgtcaaggagcaaaaccattatttttccttgactatatagctcttgggaaattagtgcctgagcatatcgaaaaaatagttggtggaattgcagatggttgtaaaatgtctggttgtgcactaattggtggagaaactgctgaaatgcctggaatgtatggagaagatgactatgatttagcaggattttctgtaggaatagcagacaaagaaaagattgtttctggaaacaatgttaaatcaggagatgtattggttggtatatcttcaagtggagtacacagcaatggattttcttttataagaaagatatttttagaaacttacaattataaaatggaacaatatgttgaagaactaggaatgacagttggagaagcacttttaacaccaactaaaatatatgttaaattagctttagatgtattagctaaacatgacataaaagctatagctcacataactggtggagggcttatagaaaatataacaagagttatacctaaagggttaggactagatatcaataaaaaatcttgggagaagcctcctatatttaaaatgatagaaggttttaatgctgttgatgagagagaacttcataagagttttaacatgggtattgggctagttttaatagtagataaagaaaatgctgatgatgttgtaaactttataaataatagagaaaatgacaatgctgcttatgtagataaaaaatacagtgaattattagaagataaagcgtatataattggtgaagtagtagatagtcatgaaggtgtagaattatgctaaatataggagttttaatatctggtggaggaacaaatttacaagcagttatagatggcactgagtctggagaaataaaaggtcaggttaaagtagttatctcaagtaagcaaggtgcttatgggctagagagagctaaaaatcataacataaaagcaatttgtgaaactgatgaagacaagataatagagattcttaaggaaaataaaatagatttagtagttttggctggttatttaaaaataatcagcccaaagctggttaatgagtttagaaacaaaatgataaacatacatccatcattaattccttcattttgtggagctgggttctatggagaaaaagttcatcaaggtgttatagattacggagctaaagtaactggtgctacagttcattttgttgatgaaggtgctgatactggaccaatcataatgcaagatgtagttaaggtaaatcaagatgatgatgcaaagacacttgcaaaaagagtgttagaagttgaacataggattttaaaagaaagtataagtcttttttgtgaaaataaattaaaacttcaaggtaggagagtgtttataaatgagtaagagagctttaataagtgtaactgacaagactggtgtagtggaatttgctaaggagttaaataagttagattatgaaattatatctacaggaaatacatttaaaacattaaaagaaaatggtgttaatgtaatgcaagttgaagatgttacaaattttccagaaatattagatgggagagtaaaaacattaaatccatatatacatggtggtatactttataaaagagataaagaatctcatgtagaaactgtgaatgagcataaaatacattcaatagatttagtagctgtaaatctatatgattttgaaggaactttaaaagctggaaaaagtcatgatgaaataattgaaaatatagatattggtggaccatctatgatacgttctgctgccaaaaactataaagatgtaatagtagtagtagatataaaagattatgattctataatagaaaaattaaaaacagatacaatgacattagaagacagaaaaaaattatcatataaagctttctcaactacaggaagatatgatgcgttaatatctagttattttgctggagaagttggagatacatatcctgacatattaaatttaactttccaaaaagaacaaactttaagatatggagaaaatccacatcaaaatggtttcttatattcacaatcaaatgcaaaaaatccaatcttaaattatgagcaattaggcggtaaagaactttcttttaacaatttaaatgatttacatggatgtttagaagtaatgagagaatttaaagatagtgaagaagtagtttcagtagctataaaacatgctaattcatgtggggtaggtctaggaaaagatgcttttgaagcatatacaaaatgttatgaagcggataaggtttcaatatttggaggaatagtaggaataacttctactatagataaagctacagcagagaaattaaatgaaatattcttagagatagtagtagcatatgattttgagccagaagctttagaggtacttaaacaaaagaaaaatttaagaatattaaaattagctaagatagaagatagtttacaaccatatgaaatgaaatatttagatggaaaattattaatacaagatagaaataatatattagcagaaaaaagtgaaaatgtaacaaaagcaaaaccaacagatgcacaacttaaggacatggaatttggtatgagagtagtaaaaaatatgaaatcaaatgcaattgcgatagtaaaaaatggtcaaactttagctttaggttgtggacaaacatcaagaatttgggcattaaaaaatgctcttgaaaataacaaagataaagattttacaggagctgttttagcgtcagatgcatttttcccatttgatgattgtgtaacattagctcatgaatatggaatatcagcagtagttcaaccaggtggctctataaaggataaagattcaatagaagcttgtgataagtatgatatggttatggtatttacaggaataagacacttcaaacactaaggaggatattatgaagatattggttgtaggcggtggcggaagagagcatgctatatgctggaaactaagcaaagaaaaaaatgtagaaaaagtttattgcgcgccaggtaatgcaggaattacaaatgtagcagaatgtgtaaatataggtgatactaatatagaagaacttttaaaatttgccaaagaaaatgaaataggtctgacaatagtaggaccagaagtaccactagttatgggaatagtagatgagtttgaaaaagaaggattaagagtatttggacctaataaaaaatgtgctcaacttgaaggaagtaaagctttttcaaaagaatttatgataaaacataacatacctactgcaaaatataaagaatatacaaacttagaagaagctatatcagaaatagatagttttggatatccagtagtaataaaagcggacggattagctgctggaaaaggtgttgtaatacctgaaaatagagaagatgctatagcaactttaaaagaaatgatgtcagataagaagtttggagctgctggagataaaatagtaattgaagagtttttaaaaggaatagaaacttcaattctagcatttgtagacaatgatacaatagttcctatggcaagtgcaaaagaccataaaaaagtaaacaactatgagcaaggtccaaacactgggggaatgggaactttttcacctagtgaaatatatacagaagaattagcaaataaagtaaaagagacagtattagaaaaaactttagaaggcttcaaaaaagatggacttaattttaaaggtattttatttgttggtcttatgataactgaagatggagaaaaagtacttgaatataatgtaagatttggagaccctgagacacaatctgttttatttagattagaaacagatttacatgagataatggaaactatactagataataagttaaaagatatagaaataaactatagtgatgatgaagctgtatgtgttatgcttacatcaggagggtatccagacagttatgaaaaagggaaaattataactggtcttgaaaacttggatgatgatatagtagtattccatagtggcactaagatgcttgatggtaatttagttaccaatggaggaagagtaattggtataactgcaaagtcaactacagttaaggatgcagcagaaaaagtttatgaaaacataaagaagataaactttgaaggaatgcactatagaacagacataggaagataatttttctaaaatggaggataaggtatgttgaatactgaaaataaagactcaatggttagaagagtattagttgaaaaaagagaaggttttgaccttgaggctaaagctttaaaaaaagacttagtagaaagtttacacatagataatatagaaaatttaagaatattaaatagatatgatgtagaaggaatatcagaagaagtttatgaaaatgcagcaaagacaatattctctgaaccaaatttagatgtagtatattatgaagaaataccaaaattaaatgatgaaagagtatttgcaatagaatttcttcctggtcaatacgaccaaagaggtgattgggcagctcaatgtgtacaaattgtaaatcaagggataagacctgctattaatacagcaaaagtttatatattatcaggcaaaataactgatgaagagttttctaaaataaaagattactgtataaatccagtagatagtagagaagcatctttagaaaaaccagaaacattaaaaatggaaactgaaataccaacaacagttgaagtattagatggatttatagatttagatgaaaatggattaagaacatttgtaagtgaaaaaggattagcaatgactttaggagacttacaacacgttcaaaaatactttaaagatacagaaaagagaaatccaactataacagaaataaaagtattagatacttattggtctgatcattgtagacatactacttttatgactgaaatagaaaatgtaaagatagaagatggtaagtttaatgatatagtaaaagaagcgtatcaaatgtatcttaactcaagagacaatgtatatgtgaacagacataaagatatatgtttaatggatatagccactgttgcagtaaaagaattaaagaagaatgggaaattaaatgacctagatgaaagtgaagaaataaatgcatgtagtataaacgtagatgttgaagttgatggtaagatggaaaaatatctagtaatgtttaaaaatgaaactcacaaccatccaactgaaatagaaccatttggtggagcagctacttgtttaggtggagctataagagacccattatcaggaagaagttatgtttatcaagcaatgcgtgttacaggaagtgctgacccaagaacgactttagaagatactttacctggaaaacttatgcaaagaaaaataactacagaagctgctcatggatatagttcatatggtaaccaaataggtcttacaactggacaagttgcagaagtatatgatgaaaactttgttgcaaagagaatggaaataggtgcagttatagcagcagtaccaaaagagaatgtagtaagagaaagacctgaagcaggagatgtaatagttcttcttggaggaaaaacaggaagagatggttgtggaggggcaactggttcatctaaagaacatagtgaagagtcaatcttaacttgtagtgcagaagttcaaaaaggagatgctcctaacgaaagaaaaatacaaagattctttagaaataaagaagttgctcaaatgataaaaagatgtaatgattttggagcaggtggagtttgtgttgctataggagagattgctgatagtttagatataaacttagacttagtacctaaaaaatacgatggacttgatggaactgagcttgcaatttcagagtcacaagagcgtatggcagtagctataaaaaaagaaaataaagataaatttatacaattagcagtagaagaaaacttagaagctacacatgtagctacagtaacagatacaggatatttaagaatgttctggaatggaaaagcaattgtagatataaatagagagttcttagatacaaacggagtaaaacaaactactgatgtccatgttactaaagtagatgaagaaaatacattctttagctctaatgaaatagtaaaagatgttaagtgtgcaagtatgaaagacaagtttacaaaagtattatctgaccttaatgtttgttctcaaaaaggattagtagagatgtttgataatacaattggtggtaatacagtacttatgccatttggaggaaagtatcaagcgactccaacacaaggtatggttgctaagataccagtacttggaggagaaactaatacttctacaataatgacttatggatataatccaaaggtaggaaaatggagtccattccatggtgccttgtacgcagtagtagaatctgtgtgtaaattggttgctattggaggaaattatagtacaacaagacttacattccaagagtattttgaaaaacttggtaacaatccagaaaaatggggtaaaccattctcagcacttttaggagcattttatgcacaaagtaaatttgagatacctgctataggtggaaaagacagtatgtctggtacatttaaagatatcgaagttccaccaacattagtttcatttgctgttgatacagtagatgcgaagaaagtagtatctccagaatttaaaaaagcagactcaaaagtagtaatgttatgtgtaaacaaggcagaaaatgatgttgtagattttgaggaattaaagagaaacttagacaaagtaagagaacttatacatggaaataaagttttatcaacatatgcattaggatttgcaggtgtaggtgaagcaataagtaaaatggcttttggtaataaaataggatttaagtttagtgaagaagctgaaaaaacatttacagatgataaattatttgaggctagttatggaaatatagtacttgaattagcaaatgatgatttatgtatgttagaaggatacaattatgttgtgcttggaagtacaactaaagaagctagtatatttatcaaaggtgaagaacttgcattagatgaattatataaagcacactgtagtactttagagcctatattcccaactaaaacagaagaagtaaaatcaaagatagagactataagttatatatcacaaggagaagctaaaaaatcatcattaagtatagctactccaagagtatttataccagcatttcctggaacaaactgtgaatatgactctgcaagagcatttgaaagagtaggagctaatgcaaacataagagtattcaagaatttaacttataaagacatagaagattctatagatacaatagtaaacgaaataaaatcttctcaaataataatgttaccaggtggatttagtgctggtgatgagccagatggttctggtaaatttatagctactgtatttagaaatcctagagtgcaagaagctataaatgaatttttaactcaaaaagatggactaatgttaggtatctgtaatggattccaagtattaattaaattaggattagttccatatggagaaataagagttccaagtgaaagtgctccaacacttacttacaataatattggtcgtcatcaagctaagattgctagaactagaatttcatctaataaatctccttggttagctcaaactaatgttggagatattcataatatagcaatttctcatggagaaggtaaatttgttgctagtgaagatgttatgagagaattaattgctaatggacaagtagcaactcaatatgttgactttaataatgaagctacttatgatattgagtttaatccaaatggttcattctatgctgttgaaggtataactagtgctgatggtagagtgtttggtaaaatgggacattctgagagaattggtgaggaagtatttaagaatattataggtgaaaaagaccaaaagatatttgaatctggagttaaatattttagataaagctttgatgtttaattgatagctagaatatataatttagatatttagatttaaagagatgtaataatatgatgataatcatttaatattacatctcttttttatttatctaagaaataataagttcaacctaagttaaaatacaagctgtgttataattaattactaagtaaaattaaatatttattggagggcaacataattaatgaaaatattaataacagggtctaatggtcaattaggaaaagaattggttagccaattagaagcaatcaatcaaagtataaatcaaccaaaatacgttatattagctacaacaagaaatgatttggatatatccaatcagactaatatagataattttattttgcataataaacctgatgtaattgtaaactgtgcagcatatacaaaggttgatgcatgtgaagataatatcgaaattgcgtataaaataaatgccttaggagtgagaaatttagcaatagcatcagaaaaagttaatgctaagcttgttcacatatcaactgactatgtattcaatggtttttctaaatatccatatagggaagacaataaaactgaacccaattctgtgtatggaaaaagtaaacttatgggagaaaagtttgttgaacaattctcacataagtactttatattgagaacagcatggttatatggtaatgggaataattttgtaaagactatgataaaactttctttagaaaataaagaggttaatgtggttaatgaccagtttggaaccccaacaagtacagtagacttagcaaaaattataataagaatcatggaaacagaacattatggagtttatcatgctacatgtgaaggtgagtgtagttggtatgattttgccaaaaagatatttgaattaaaaaatatagatataaaagtaaatccaattaagagtaacgaatttaaatgtaaggctcaaagaccactatattctgtattggataattttatgttgaagttaattggtttaaattcttttagaaagtgggaagaatccattgaagaatatttagaaagatatgatataaatgaaaagtaaatgtattatttttagaaaagaaaataagatattataaaaaatataaatatttcttttatttatccgataatcataatatgacaaaaacaaatttaaggatggaaaaagatgaaaggaattattttagcaggagggtctggtacaagactatatcctataacaaaatgtatatcaaaacaaacacttccaatatacgataaaccaatgatatattaccctatgtcggttcttatgttggcagggatacaagatatattaataatatctacaccaagagatataaaagcatttgaagaattatttggagatggaagttcactagggcttaaaataacatatgcaattcaggagaaagcaaatggaattgcagaagcgtttataataggagaagaatttataggaaatgacagagtgtctcttgtattgggggataatatattttatggatatggatttagtgaaaggttggagaatgcagttaaaagaaaaggagcaactatatttgggtatcatgtaagtaatccaaattcgtttggagttgtagaatttgataaggattttaatgtattatcaatagaagaaaaacctacagttcctaaatctaattatgctataccaggattatatttttatgataatgatgttgtagagatagcaaagctagttgaaccatcagatagaggtgaattagaaataacctctataaacagtgaatatctaaaacgaggaaaactaaaagtggaacttctaggaagaggtatggcttggcttgatactggtacacataaaggtctattggatgcttctaactatgttgaagtggttcaaacaagacagggactgtatatagcatgtttagaagagattgcatatacaaaaggatatataagtagagaacaattaatgaaactagccaagccactgataaaaactgaatatggtcaatatctattaaaattggctagtgaagatatgcaatatggtagataaaatttattataaattttattaagggagtttgttataatgggaaaaatcaatgttataaagactaaaatagaaggattatatatagtcgaaccaaatgtattttgtgatgaaagaggatattttatggaaagctataataaaaaggattttatagagcagggtcttgatatgtgttttattcaagataatgagtctagctcaagaaaaggtgttttaagaggaatgcattttcaggttagatatcctcaaggaaaattagtcagagttacagagggagaagttttcgatgttgcagttgatttaagaaaagattcacagacatttgggaaatgggaaggtgtaatattgtctgataagaataaaaaacaattttatattccagaagggtttgcacatggatttttagttttatcagaaaaagcagtatttaattacaaatgtacaaactattattatccagaatttgagcatgggtttatatggaatgacaagcaaatatctattgagtggcctttaaaaggaattgaagaaatatttttatcagaaaaggacaaaaaacaaaaaagttttaaagatatttgtataagacgttaataaaaatttattagaattaacatttaggagaaaaaatatgaaaaaaatactgataactggaggagcaggatttattgggagtaactttgtacattatatgcttaacaagtatgtagattattttattgttaacctagacttgttgacttatgctggtaatttagagacattaatagaaatacaagacagttccaattataaatttgttaaaggagatatttcaaatagggaacagatgtataagctatttgaagaagaaaggtttgatatagttgttaactttgccgctgaatctcatgtagataggtcagttgagaatcctgatttatttattaaaacaaacattataggaacacaagtacttttagatgcatctataaaatatggagttaaaaggtatcatcaaatatctacagacgaagtgtatggtgatttaccaattgatagaaaggatttattctttacagaacaatctcctatcaatccaagttctccatattcagcttctaaagcatcagcagatttgttggtaagttcttattatagaacatatggattgttaacaactatatctaggtgttccaacaattatgggccatatcattttcctgaaaaattgatacctcttatgattttaaatgctttggaaaacaaacaattgccagtatatgggaatggggaaaatgtaagagattggttacatgtatatgaccattgtactgctatagacttaataatacataaagggaatataggggagatttacaatataggaggtcataatgaaagaagtaatttagaagtagtaaaaatgatattaaatcttttagataaatctgaagagttaatatcctatgtaaatgatagacctggtcatgatttaagatatgctattgatgcaactaaaatagagaatgagttaggttggaaggcaaaatatgactttgatttgggtataaaagaaactgttaagtggtatatagaaaatgaatcttggtggaaagctgttttatcagtgtaactttgaaatttataaaatttagaaaggggcgttttatattgaatgagataagttcactaattaatatattagcattgactcaattatctggtagtaatactacaaatcaatgtaactgtacatataatagttcatctggatttgatatgattatgatgaccttgttaaaagcattatcacaaaataatcaacagacttctaatggctacaatttatcgtctaattctgagaatttatttgacgaactcggcagtgtagtaaataatacagctagtagatttatagatgttgatacaaaagataaaagtgtaaaatcaagaattgaaaatgctatagagcaagcatcaaaaaaatataatgtggattcgaatcttataaaagcaataattaaagttgaatcggattttaatccaaatactgtttcttctgctggtgctaagggtcttatgcaacttatgccagaaaattgcagagacttgggggttacagacccttttaatatagagcagaatatagatgctggaactagacatattaaggaatacattgatatgtttggagggagcatagaaatgggattgatggcatataatggtggtcctggaagaatgaaaagtagaggagtagaatcaatctctgacctgtataaaatgccaaaagaaacacaaaattatattcctaaggttatgaaatattatagagggtaggctttattatggggataaatatagataagctaaacataagtccaagtataaatatggaggttaaaaaactaaaagagagtaataaattttctgacaaattaaactctttaaaacaatcttcttcattggaagatataaaacgaaatttggaaagtgtaaaaaaggcaggagaaaggcttgtacttactcaaaactatggcgacattagtatatataaaaatgcagtaaaagaatacctaaaatctgttgtagataatatgtattcacttgataaaaatagtagcttttgggagcatcagtattataagaatgtaaagattgttgatagtaaacttgaggatatgactagtaagttaattagtgaagaaaaagaaaacatagatattgtttctactgttgatatgatacaaggcttgttgatagatatgtatagataaggttatacaaggagaaaagttttatgaatagtaaaaaagaggatatatatgaattgaattttgggcaattaatagaagaaaaatctggtgttatagaagaaaatcaaaatgtttttaatgcaaaagtaaatgtagctgtttctataggaaatacaacagaaacaataaaaaatatattagatttaaaagaaggctctataataaaactaagtaagaatgtggatgaaaaattagatatatatgcaaatgatagattgtttgcttatggagaaagcattattacaaatgagaagttatctgtaagattatctaaaatagaagattcagatgtaaattagtattttaaatagtatccctttaggctatgatgtatgagtttagctaaggggatatttttataaaaaatttaaaatatgcgtgaattatataaatgtttttattttatgagcgataattaaattataagtatgtaattttggaggtgaaactatggatattaaaaatgtaagttcaaatattgtagtgaataattatttaaagaatacatctggtgtaaaaaaagtggaagaagttaaaaaaattaataaaacagacaagatagagctatctaaatttgcaaaggaaatggcaagtgtgtcaaatatgagtgatgagaatattaggaataaaaaagtcgatgaaataaaaaatgcattagaaaatggaacttacaaaataaaaccaaaagaaattgcgaaaaaaatgatagaggatatgcgaggataaagtcatgattacagacttaaaagttataatatatgaagaaaaaaatataattagtaagatgatggaattattaaaagaacaatttgattatatagttgaaaaagacttagaaaatttaaatatgttaaatcctaaactagaagatattagcagggagcttgcatccatagaaataaagagaagacaactttttggtgatgatatttcaatgagtgaagttgttgaaaatagtaatgatagatatttaaaagaaatatatacagacttgaaacacattcttgctttagctaaaaatcaacaagaatcaaatgattctctaataaagaaagaacttatttttacgaaaaaaatgattaatttcataaaaccagctgataagcaaactgcaacttataattcttatggaaatattagaaaataaatattaggaggagaaatatggcaggattattttccattttaaatacagctaattcaggaatgaatgcgcaccaaaaagcaatacagacaatttctcataatataagtaatctagatacagacggttattctaggcaaaggactgagtttgctacaaatagtccaatgtatatgcctagtttgagtaattcaattgcaagaggacaattagggactggagtacacgtaacggatgtaacaagagctagaaatagtttttatgattaccaatttagagcagaagctcataagtatggtaatacagtttcaaagtatgactattataatactatagaaactataataaatgaaccatcagactatggaatatctgcaggtatagacgacttttttaaaggatgggaatcattagcaaaggatataaatagtgatagtaaaaaaagtctagtggtagaaaatgcatcaaatctagcaactttaataagtgaaagttataagaagcttaataagttaaagggagatatagacgataatataaactctgaaataaaacagataaatgacatgttaaaaagtcttgaagatttgaataaatctattgatgttatatctggttctggctctactccaaatgatttacttgatgaaagagatagaatattagatgacttaagctttaaattagaccttgaaaatagcgatgttaaaaatatgctttcagatggtaaattagaacttaatgaattaaaaaatgcagatggaacttggaaaacaggtgtatcaggaaccttacaaggcttgtttgaaatgcatggtaagattgatacatataaaagcgatttaaaagatgtatctgatgggttagctaagcagataaatgatgtttataatacatctgctggaataacagtaacagatttttttataacttcaaatgtagatggtgaagatatcataaaggtaaatccagctataaagagtaacccaaatgaattaaaacttactgctgatgaggcttcaaagattgctaagttaaaggatgaaaaaatagatattggggtggctggtggaaaagtaagtacaataagtgaccactataaagcctttgcagaatcagtaggtttagattctcaaaaagtgaatcaagatgaagtgaatcaacgtaaaattataaataatattgataactcacgaatgagtgtttcaggcgtatctttggatgaagaaatgacagagcttataaaaatacaacgctcctatcaagctagtgcaaaagttatgtcaacagctgtgcaactgttggatgttgtaataaatggaataatttaatagaagggggaatttataatgagagttagtacaggtatgatgtctagcaactatctaaactcactacaagataatctacaaagattagataaggttaatagacaagttaatacaacgaaagaaataaacaagctatcagataatccatataaggcaataaaaatattgaactcaaaaagtgaaataaaaactatggagacttatgttgagaattgtaaagatacagggaattggttagaaactactgatactgcattagatcagcttggaaaattattatcggacataaagaaaactttggtggcaagtggtgatggtgcatattcagatgatgagctaaagactcttagtaatgaaactaatgaaaagatgaaagaaattgcaaatgccttaaatgcaacacatgaaggaaagtacatattttcaggttcaaatacaggtgtaccacctgttgaatgtatagataatgctgacggttcagtgagcttaaagtttaattctagtttaaatcttaataaattaaatgactctttgagtatggatatagctcaaggaataagtgtagattataatgttaaattgagtagccttggatttgacccaacaaagactgacccatttgaagagttaaataatatatcaaagaaattagcaaatccagatgctgatgctataaaagagctgacaacaacttgtttaggcgacatggaacaattaatagaaaatacagtaaatgttaggtctatatatgggacaaaagcaaatacagtagaggctatgaaggaaaaaaatgatgatagtttgatacagttaaaggatattttgtcacaaaatgaagaaatagattatggagaaaaactcgttcaattaaaggcagcagagttaacttatcaagcttcactacaaacaggaggaaagttatttaatgtatctatattagattacatatagtaaaataacgcagatatgatgaaggttacattaaaaaaaggtatattaggttttgaaaatttaaaagaatatgagcttttagatatagaagataatgattctttaaaagaatttaattctactgaagaagaaggtataggatttgttgttgtatctccatttgagattatcaatgaatatgaaatagttttaaatcaggaaacaatagaaaaactagaagtgaaatctccaaaggatgttgtactatttaatataattactcttggtcagacatttgaagaatcaactgtgaacatgaaagctcctatagtgataaatataaaaactaattttggaatgcaaataattttacaggatgataaatattcaataaggcatccattattgagaggtgataatggatgctagtaatttcaagaaaaaaagatgaagcagtacttataggagaaagcatagaagtaaaaattgtaggggtagatggaaacaatgtgaaactagctatatcggcgcctaacaatataagtatattaagaaaagaaatatacgaaaaagtaaagagtgagaatataaaagctacaaataaaaatataaaaattttaaagtcattaaaataataagcttggaggaagtaatatatgtatggagaaaatccttataattcttataaacaaaatgctgtttttatggcatcaaaggaacaattgttacttatgcttgttgatggagcagtaaaatataccaaaatagccagagcagctatcttagataaaaatacacagaaagcgcatagagaacttgtaagagttcaggatatatttacagaactaatggttacattagaccaaaatgcaggacaatgggcaaaggatatgtacaaagtttatgattttgtaagatatgaactttcaagagccaatattagaaaagacatccaggtaatagataatgtgttgcctgtaatagaacaaattaaagacacatggcatgaagctgataaaaaaagtaaagaagaaagaagtaggtacaaataatggaattaaatttagctgaattagataagttatcaaaagaggaattactattgatgcttgtagatggcacagtaaaatataccaatatatccaaagaagctcttttaaataacgactatttgaaagcacataatgaacttataagagttcaaaatatatttacagaactaatgactacattagaccaagatgcaggtcaatgggcaaaggatatgtataaagtttatgaatttataaaatctgaattagcaatagctgatgaaaataaagatattaaaataattgatgatatattgccaatagtaaaacaaattagagatacatggcatgaagtttacaatcaactaaaaatataattagatggagggataaaggtatgtcaagtataagtcctataagagttacaggtctttcaggaaattttgatatggaaggcataatcgaagctagtatgattagagacaaggaaaaagttgataaagcaaaacaagaacaacaaatcgttaaatggaagcaagaaatatatagaaatgttatacaagaatcaaaagatctttatgataaatatctaagcgtaaattctcctaatagtatagtaagtgaaaaagcatactcttctacaagaataaccagttctgatgaaagtattatagtagcaaaaggctcagctggtgcagaaaaaataaattatcaatttgcagtttctcaaatggctgaaccagcaaaatttactattaaattaaattcaagtgaacctattgttcgacagttccctccaaatgccagtggagctagttctttaactataggagatgtaaatataccaatatctgaacaagatactacaagtactattgtaagtaagataaactccctttgcgcagataatgatataaaggcttcttatagtgagatgacaggtgaattgattatttcgagaaaacaaactggttcgtcatcagacattaatttaaaagtaattggaaatgacaatttagctcagcaaattgctaatgataatggtatcacatttgcaaatgatgctagtggaaacaaagtggcaagtgtatatggaaaaaatctagaagctgatgtaactgatgaacatggaagagtaactcatataagtaaagaacaaaattcatttaatatagataatattgactataatgtaaattcaaaaggaactgcaaagttgacttctgtcactgatactgaagaagctgttaaaaatatgcaagcatttgtggatgattataataaactgatggacaaggtctatggtttagttactactaaaaaaccaaaagattatccgcctcttacagatgcccaaaaagaagatatgacaactgaagaaatagaaaaatgggaaaagaaagctaaagaaggtatacttagaaatgatgatgagttaagaggttttgttgaagatattcagtctgcattttttggagatggaaaaaatattattgcattaagaaaactaggtatcaatgaaagcgaaaattacaataaaaaaggtcaaatatcatttaatgcagatactttttcaaaggctcttatagatgatagtgataaggtatacaaaacactagcaggttattcttcgaattatgatgataagggaatgtttgaaaagctaaaagatattgtatatgaatattctggaagttcaacttctaaacttcctaaaaaagcaggtatagaaaaaactgcttctgctagtgaaaatgtatattcaaaacaaattgcagagcaagaaagaaatataagcaggttagttgaaaaaatgaatgataaagagaaaagactttatgctaaatattcagccttagaatctttgttgaatcagtattcttcccaaatgaattatttctcacaagcacagggtaattaattatggataaattaaaagaaaaattaaatttatataaagatatatctttacaaattataaatttgattgaaaaggaagaatatataaagataagtagtaagttaggtgaaagacaagagattataaatagtgtaagtgaaattgatagaaatgattttatacagctttataatagaatggaattaattgaaattgatagtaggataagagatattttacaaggacaattattagaagtaaaaaaagaattacatgagtataagcttactaaacaagtgaacacaatgtattataacttaaatagagaaaaagtaaatatttttaataaaaaagtataaagttatgtaccatcttgtccgattatataaatgaagaattaataaaaaagattaaaagtagaaatgacaaggatgtcaactatactaaggagggtaaaataatgagagttaatacaaatgtaagtgctttgatagcaaataaccaaatgggaagaaacgtaaatgcacaaagtaagtctatggagaagttatcttctggtgttagaattaagagagctgctgatgatgctgctgggcttgctatatctgagaaaatgagagctcaaataaaaggtttagaccaagcaggaagaaacgttcaagatggtatatctgttgtacaaacagcagaaggtgcattagaagaaactggtaatatactacaaagaatgagaactttatcagtacaatcttcaaatgaaactaatactgctgaagaaagacaaaagatagctgatgagttgttacaattaaaggatgaagttgaaagaatatcaagctcaattgagtttaatggtaagaaattacttgatggaagttctacagaaataagattacaagttggagctaattttggaacaaatgttgcaggaacaactaacaacaacaatgaaataaaagttgctctagtaaatacttcaagtataatgagtaaagcaggtataacaagttctacaatagcaagcttaaatgcagatggaacttctggaacagatgcagctaaacaaatggtgtctagcttagatgtagctcttaaagaattaaatacatcaagagcaaaattaggggcacaacaaaatagactagaatcaactcaaaacaacttaaataatactatagaaaatgttacagcagctgaatcaagaataagagatacagatgttgcttcagaaatggttaacttatctaaaatgaatatattagttcaagcatcacagtcaatgcttgctcaagctaatcagcaaccacaaggagttttacaattattaggataaaataattttgtatattggatatagaagaaagggtaaggctttgctttactcctttctttttttacaaatatacttttgaaaggaaaatatatatgttacttagtatagttatgattgttaaaaatgaagaaaaaatacttgaaaaaactttaaaatcattaaccacattaagaagttctatagagagtgaacttataatagttgatacaggttctacagatgatactataaatatatctaggaaatacacggaaaatgtgtactttcataattggaataatgatttttctagtatgagaaatatatcaatatcctatgctaaaggtgaatggttacttatattagatgcagatgaaatactaattgattcttcaactattgtgaaattttttaaagatggtcttgataaaaaatttaattcggcctcaatacaattaaaaaatctttactcatatgataaaaaattatatggatattgctcagtgcttagactttttaaaaacatcgattttagataccatggtaaagtacatgaacaaccaatatacaaaaaccctatatttaataatgttgctgattttgaacattatggatatttgtttgaagatgaagaaataagattaaataaagtaaaaagaaatgaaaaactgttatttgaagaattaaaagagaatgataattctccatatacaaattatcaattagggaaaaattttattatattaggaaaatatcatgaggctttatactatcttgagaaatcttatgaattatattctaaactagaatcggcacctggttacttgataacaagtcttgtaaaaacatatttatatttaggaaagcataagaagtgtgaaaaattgtgtctaaagtatattaagaaagacatgaataatattgatatatattattatattgcacaagcacaagtagatttagggaagtatgaaaatagtatagattcgtataagagatatatttatttgttagataattatgaaataagtacacaagcaaatagtttattttcagacactgatactgtagggcttagggatgaagctattattacactgataaagatttattataaacttgaaaaatatgagtctgtaatttcagagtacaataacattgaggatatggaaaagaagaagaatgtgtactttagcttatttatgtccctatacaaattgaacagatttgaagatataaaaaactattataaagaagtttcaaattctaaaattgaaaaaaatagtttttataaaaatatagaagaagttataaataatattaaagatgatgaaaaagagcatgtatataaaatcctttgtgacattgaaggtaattatggcattttaaatcagataaggataaataaatgtgtatctatagataagtgtaaagaaatactcaatgaagaaaaagaaataatttatgcatatattataaaagtagcttttgaagataagattgatttactagatattttttatgaaatggaatatgtatggatagagaaatacctaaaatatcttttagcactagaaagaagttttaatttagtactatataagtacataattagtcgtccgaatacatcagatataaaaaagataagagtatataaagctatatctaaagtagttttagaaagtataagtttaagtgatgaaaaatataaggagattttttatctttatataatgtattcttataagtacataagatacatatatagaaatttaagcgattttgaattaataaaatttgtttgcaatgatttagataagtttactatagaatttaagcatctacttgacattaaaaataaagtaaatgatgctaatgaaaaattagagtatatacatagtatgaggaaattactaaatgagtatcctttttataataaaataataaaaatacttataagtgaattagaagaaaatataaaagaaagtgaagaatttaaggatttaaaagatagttttattattagtatagaaaatatgattgaaactggcaaaataaatgatgcgaaatcattggtagatgactattcaaaaacatttatggatgatgtaaaaattttaaatataaagggaattttatatatgtttgaaaataagcttgataaagctgattttatgttaaaaaaggcattatcattagatgtagaaaatgaagatactatatataatatagaatacttaaaaagtttaagataagtcaaaaatgggagaattgaagaatgaatacaccaatagtggttaatgaaaaatctaaagatataataaaagattggcaatatacgtatacaaacgaagatataaaatttacaagcataataatattgacatataatcaaatagaatatactaaattatgtattgaaagtattaggaagtttaccccaaagaataaatatgaaataataataattgacaataactcttctgatggaacagttgagtggttaaagggacaatctgacataaaatctgtatataataacaaaaacctaggatttccaaaaggatgcaatcaaggtattgagttggctactggtgaaaacatattgttgttaaataatgatgtaatagttactccaaattggctttataatttgaataaagctttatggtctcaagataatataggtgctgtaggtcctattacaaatgcatgttcgtactatcaacaaattgatgttgattataaatcaattgaggatatgtttatgtttgcacacaaaataaatacatctaatattaacctatggaaatatagattaaagttagttggattttgcatgttaataaaaaaatctgtgctggataatgtaggggttttagatgaattattcacacctggaaattttgaagatgatgatttatcttttaggatgctagagtcaggatataagctattattatgccaggatacttttatacaccattttggaagtgtatcttttaaagaaaatcgtaataaatatacagatataatgtatattaatagaagaaaatttgaaactaagtggggatttaatccagaatatagtggaatgataagaacagatttgatttctaaaatagatgatagtttggaggcaaatattaatgttttagaaataggctgtggtataggggctactcttttagaaataaaaaatatatataaaaatgcatcaatatatggaatagaaattagtgagtcagcaggtaaacttgcaaagtatagtgcagatgtacttatagcagatatagaaaaagtaaagttggattatgaaaaagatttttttgattatataatattgggagatgtacttgaacatttaactgacccatggaagatagtcaatgaactgaaacaatatctaaagaaggatggttgtttgatatctagtataccaaatattatgcatgtttctgttttaagaaaccttgtgttaggtaattttacatatgaagattcaggaattttagacaagactcatttaaggttttttacattaaatgagataacaaaaatgtttaatgatagtaattacataataaatagtgttacagctactagtatgccactttcggaaattgataatagattcattgatacaatgtgtaaggaaagctgtaaagaaatgagacaacagtacgaatcttatcaatatatagtaaaagccactaaaagcatagatactaaaagatattctagtattagtatggttaatttaaaatacgctttaatgagaattgataatgaattagatgtagatagtaatttaagttatatatttgataattataatataactgaaccatgttttgttgatgatattgaatatttagttgatacgtttgtgataaataaagcaactctattaaatagattaggagttgaggcatttaacagaggtttaggagattttagtataaacatgtttatgacagtattagagatggatagagatgatattgattcaatatataatataacaagtgtattatgtgaattagaagaatttgatactgcttacaacttaattaaaaatagtagcaaaaaagtacagagtgaaagtgacatacaagatatactttattttattgaggggaagagatatgaataatgataagatatgttttataacctgtgtaaatgatgaaagactttatgaggaatgtcttgtatatataaatagcctagacattcctaaaaactttagcatagaaacagtagctttaagaggagccgattctattgcctctgcttataataaagctatgagagaaacagattctaagtataaggtatacttacatcaagatgcttttataattaataaaaatttcatatatgacattttagagatatttaaaaaaaatacagatgtaggaatgattggtgtagctggagtaaaagatatacctgtgaatggaatttggtgggattctgataaaaaagcagggaaagtatatgatagccatacaggtaaaatggatatttatgaatttagtaactttgaagaatgttttaatgaagttatggctatagatggattaattatgattactcaatatgatgtattttggagagaggataagtttgatgggtggcatttttatgatttgtcacagagtatggaatttagacaaaataaatacaaagttattgtaccaaaacaaaataagccttggtgtatgcatgattctggagtagcaaatataaataatggatatgatgaatataggataaaatttgtaaaagagtacataaatcttgatttatatagagaaaatttttatgaatttgataagaagaaagcaagtaccatacttaagagtaataagcatgtaatggattgtatgaaagaggagcttacagaacaattaagattaaagaattataaggatgttttagatattgtttctaaaattgctcatttttctgtttttaatcatactggcttgtattcttgtgaaaaatgtgagagagcattgctagaatgtgcaaataatttaccagaaatagaaaatacgaaattatttacaaaaaaagatttaaaaagaagaaaagtattacatgttttaagtgaaggatattcaacaggagggcatacaagactagttaaaaattggattgagattgacaaagattctgttcattcagttgtaactacatggcaatcagatacactgccagactggttattaaaagcaatagatgatagtggtggcgaagttatatctttggatttaatttcagatgattatttaaaaagagctgtagctttgaggaaaatagcttatgactgggctgatatagttattttatatgttcatatgtgggatacaatacctgttgttgcttttggagttgatgggaaaatacctattttacatgttaatcactatgatagtactttttggttagggacaagtattgcagatattgtcattgattttagcgaagctagtcaattaattacattagataaaagaggcatagataaatctgaaatattaccaatgccattaaaagaaaaagaagtattttcaaaatctgaagttagaaaacgatataatttggaggatgatgtgacaataatattgactattgctagtgaaagaaaatacaatagtgtaaatgatattaattactttaaaattgctaaaacattgattgaaaatacagataatacaattattattgttgtaggagttgatacagagaatctctattggaaaactttaagtaacgttacagataatagagttatatgttttggaacaacagcaaatatagacgatttttataagatttcggatatatacctagagtctttcatggtagggagtcatacttcaaaattagatgcaattttatatgatttaattcctgttaagtttaaaaatgaagtttcaccaatttttacaaatatgtggaattttatagataagtttgattataagaatataaaagaggttatagacatgataagaaggtacaatactagtgaatttgacagggataagataaaagaaaaacaatcagaaataaaacattttgttatagataaacactgtattgaaataaaaaactatatagacaaaatatataaagaggctaatcatcataaagttaagtatgatttatataaaaatgatgaaatcgaagactatcagctttttgttgcattatatggttatatggtaaaaaataaaaacatgtcataggtgataaaatgaacaatattcatatcaataaatttgaaaaaagctgtgaaaaaaactgggattattttgtagaaaataaatctataaatggtacatttctgcaaactagaaatttccttaattatcatgaagaaggaaaattcactgaccactcattaataatatataaaggtgaagaaatactagcagtcgtacctgcatgtgaaacttatgaaaatggtgaaagagtatttttttctcatttaggaagcacttttggaggtattataataagaagtggttttaatgatattaggcatgtaaatgctattacaaataagttagaaacatatttacaggaacaaagtttcaataaagtatatttaaaaaatacatcaagaatattttgtaaagaggatacttcattactagaatattttctatttaagaataattacatgttttatgatgaattaagtatgtttttagaattaagtaagtataaaaaagatatattagctaattttagatatagtaaaagaagatattttaaatattctttgaagaataatcttacctttaaaagattgtatagtgatgaggatatagtttgtttttttaatttactttctaattgtttagatagtaaaggagctaaagtaatacattcagtagaagaacttttggagtttaaaaataatagattaaaagatattgtagaattttatgcagtatatattgatgacattatgatttgtgggagcatggtatttaactttcaagaaagagtttatcatactcaatatctagcatcaaattcgacatataataaatattatccaatgatatttttatactataatctaataaaagatgctttagagagaaattttaagtatctttcttttggaattagcactctaaatagaggcaaatacttagacgagggtttagctacatttaaagaaggttttggttcaagtgcaatttgcaacagaacatactataaaaatataaataagtgataatcatgttttatagagtttttagagtatagtaaatatctagtactctaatattacataaaaataattagtttataaagaaggtttgtatatgaaaagattaatgattttaggctcaattaagtattttgagaatattgttatgtcagctaaaaaagagggaatatacacaattgtttgtgataatagaattgatactcctgcgaaaaagatttgtgatgaagcaatagatgttgatgtatttgattttgataaaataaaaagtatagctatagataaaaagatagatggaattttaactggatttacagattctttaatgaaaccatatgtttatattgcaaatgaactaaatttaccatgtgtgatttcttgcaatcaacttgaatctgtaactaataaggctattatgaaaaaatattttaaaaataatgcaatacctacaactgattattgtattattgaaagtctaaaagatttagaaaaaatacaaggattaaattttccacttgtaataaaacctgttgatggttatggttcaagaggtgtatattttgtatcaaatatagaagaattaatagaaaaatttgaatattctaaggaagcctcacaagatggacaagtaataattgaggaattttatgaaagtgaggaaatacaaggactagcttgggttcataatggagagtcacatgtattttatattggagatagagagcttgtaaatatacatacaggaagagctggaaaaccagatagattactttatccatcaaagtattgttttcaatatgaggaagaaataaaatctatatatcaaaatataacacaggcttttgatataaaaaatggacctctttatgtacaaatgttagtgggagcatatggaataaaggtatctgaagtaatgccaagattacctggaggttgtgactatatggctatttctcaaataacagatttagacataggaagtttatttgcaaactttagtgtgaataatgaagtaaattttgatgaaataaagaaatataatatgcatttatcaaaatgtgtatatgcattaccaatatacataagacctggaacaataaaaaagataaataatatagataaaatagaaaacttagattatgtcactcaatttctattattagtaaaagaaggagatacaataggattatatgaggatgagagacaggattgtggaagagtttatggaatagcaaataatatatttgatgcaaatataaagaagaaatgtattcatgaaatgatagaaatatttgatgaaaataatgaaaatatgatagaaaatttttaaataagggagtatgatagatatgaagctaataactcatgaacaaattatgtcattaaacatttctcagaaacaaggatatgaatggataaaagaatcttttttaacaaaaaaagattgtcaattaccaccaaaaataagcatggtagaagaaggtcatgtattttacaatgtaatgccgtccttaaatcataaccatatgattggtggaataaaaatggttacaagattgccagggagaaatccaagtttaaattcagatatatttctatacaatatgaaagatgctaaattaaaggctattttggatggtaattatattacagcttttagaactgctgctgttgctggtttggctattgatacttttgctaaaaaagattttaatactatttctattatgggtttaggtgtaactgcttctgctataatgaatatgctttcgtatactcttaaagataaaaatataaatataaagttacttaaatataaagaccaagcagagtcatttataaaaaagtatgaaaaaaatgaacaatttagttttgaaatatgtgatacacatgaagaacttattgtagattcagatgtagttatttctactgtgacatatacagatgaatatttatcagaatttaaatggtttaaaaaaggtgctttattattacctgtacatgttatgggatttggaaatgttgattatctatttgataaagtatatttagatgattataatcatttgaaacatctagaaaatatagatagatataaatattcttgtgaattttataatgttttaagtaaacaagctaaaggaagagaaaatgatgatgagagaataatatcttacaatataggtttgtcaatacatgatatattatttgcaaacaaaatttacgaattgtgtgaaacactaaattgtgaagagatagaattaaaagaaccaaaagaaaaatattggatatagtttatttcattcatatttacaataatttattgtaaatatgaatatgaagtaatatattgttagaaaattagcatgaataggatagataaatttatggataaatataatttaattaagttcttatctattggaaacgaatatataggaaatttagttgcattagaatcaaataaagcaataccttttgatataaagagagtttattacatatatgatgtaccaaacaatgtaaagagaggatttcatgcacacaaaaacttggaacaagtactagtttgcctaaatggaagtgtgaagataaaatgttatgatggtgtaaaagagagtatatttaatttacataaaaatgatgttggattgtatataggaacgggagtgtggcatgagatgtttgactttgatgaaaaaactgttttaatttctatagcatctgaacattacaatgaagaagattatattagagactataaagaatttttaaagtatttaaataatatgtagttattatacagttagtgatgtattttcttaattaaataaatttaagatagccatatagagaataaatagattaggatgtgaatttattgttggttaaatttaataatttattaaaacagttccaaactcataaagaagaatatgaacagaagattaaggatgtaatggaaagtggatattatatccttggaaatgaagtaaggcattttgaagaagaatttgctagctatgtaggtagcaaatattgtgttggtttagccagtggtttagatgcacttataattgcttttagagcattaggaataagtgaaggtgatgaagtaatcgtgcaatcaaatacatatattgctagtgttatgggaatcagcataaatggagcaacaccagtatttgtagaaccaaatgaatattataatatagattcatctaagatagaagaaaagataaatagcaaaacaaaagctatattagtagttcatttatatggtcaagcaagtaaaatgaaagatatacaagaattatgtgataagtataacttgtatttaattgaagattgtgctcaatctcatggagctaaatatgatggaaaaatgacaggaacatttggtgatataggttgttttagtttttatccaagtaaaaatttgggtgcatttggagatgcaggagctatagtaactagtaatgaggaaatagctgataaagtgaaaattcttagaaactatggttcagaaaagcgatattataataaatttgtcggatataattcaagattggacgaaattcaggcaggtttattaagagtaaaacttaaatatctaaatgaaattgaaattgaaaaatcaaaaatcgtagatagatatcttaatgaaattaataatcccaaagtcatacttccaaagatagaaaataattgtactcatgtatggcacttatttgttttacaagttgaaaaacgagatacatttatggaatacttaaagaaaaatggtatagagtctataatacattatccgataccaccacatctatctgaagcatatgcttatttgggatataaaaaggggagttttaatatagctgagaactattcagataaagttgttagtatacctttatttgtcggtatggaagatgaagaagttagttatataattaaaattataaatgaatattaaactaatcataataatatcaaaaataaattttctatatatcatttatttaaatttcgttaattgacatttttaaatattgatatattgtacaaataaaattgaaatatatggaagaatatagaataaagatgagatttgtctaatatttttataaattaaaaatattttcaaagagtttattataaaattgtagactatagtgtttataatctttgtaattattggtaactaaatttaaaaaataaaatatttaattatacacaaaaaagatatttaaaaaatttgttatttattgtatacttaagttaaaactaaataggcaaatctagagaaatctagtgacgcaaagctataggggctaaggtttgtatacacaaactatgtcagccagttgccaaaaagagttctaggtatattgtatacgtaggaagagtctaggatgactgcctttttggtggtcattttgttatggaaaaaatcacattatgtagtaaaaaacacctataataacatattataccaaatataatttaaaataaagataaattatctataaaagttactattttacaaaaaaaggcaactttataaagaaatatttaaatttatattaaaatatttttatatttttattaggatttacgaaaataatattagttttcttaccaaagtgatacattattatattaatgtaatagaaatgtaattaatttggatgaataaagaagtcattttttgtaatatagcaacttcattttttattaataagcaaaataaataaaatatattttgaggaggagtgagtgtgaatacatatgacattataaaaatgggattagatgcaactaatttaagaagtcagacaatagcaaataatatagccaatataaatactgaaggatataagagacattatgtaacttttgaagaaacattaaatgatgctatgccaaaaatagaagaaaaaacagacaattctaaaggattaagagtggatggcaataatgtagatatagaagaagaaaaagtaaatcaagcaatggcaacattacaatataatgctttgataagttttgcaaatggaaaaatagcaatgactaaatcaataataagtgggaggtaattaaaaggtgagtgtgttcagtggaatgagaatatctgctagtggattaacagcagaaagcttgaaaatggatatcatatcgtccaatgtagctaatataaatgccacaagaggtccaaatggagaagcatataggagaaaagttgtttcatttgaagaaaactatgataataaattaggtatgctaggagtaaaagttacatctgttgaagatgataaatcacctcttaaagaagtatatgacccatctcatccagatgcaaagccaaatggatatgtagaatatccaaatgtaaatatattggtagaaatgacagatttaataacagcttcacgagcatatgattctaacgtagatacattgaatgctcagaagtctatgatatcaaaagctttggaaataggaaagtagggataaattatgccaattacacaaattaacaatttaatgcaaggtgcaaagttagataatttgattggagaaacaaaaccattaactcttaataataaagaagaaaaaaagaactttgaagatgtaataatagatactatagataaagttaattttcaacaagtgacagcagatgatatgaaagaaaaatttataaaaggcgaagatgtttctatgcatgaagttatgttaataggtcaagaagcacagctatctatgcaatatttaatagaagttagaaataagattcatgatgcatatcaagaaatgaataaggtacaaatttagccttttgaacaggagtaataatcaatgatagccagttttaaaaataagattaaagagcaagttgctaaatctaggacaaagataagttctctaaaaaagggaactaaaatagcattaggtataggggttattgctatatgtttagcgctagtatttacagcaatatctgcgagcaaaaataagtatgcagtcttattttcagaactagatgttcaagatgctgcagatatatcagcagaattagagtctaaaaagatagatactaaggtaaagggaagtacgatttatgtacctagaacagaagttgataagttaaggctggagctagcaccaagtcttacaggtggttctaaaggatttgcactaatggatgatagttcatcaataggacttactgatgaagagtttcagattaagaagcaaagaatgatacaaggtgaaatagaaaaaacaataaagagttttccacaagtggaagatactagagtacatataacatttggagagtcatcagtatttgagaaggaggctattccagggagtgcagcagtttatttgatgttaaaaccagggacgactttggaaaaaaaccaaataaaatctgttatggcacttatatcaggaagtgttacaaatataccagagaaaaatgttcaagtcattgataacaaaatgaatttattatctgaaggtattttagaggatgaagatgttgatgaaaataatcaaccaacaaatagtttgattaatgttgataaaaataaggcatctgaacaagcattgaataaacaattagaaaagtctattttagaaatgctagaaccaatatttggtaaaggaaaagtaaaagccacagtaaatgctgatttaagttttgatacagctgaaaaaactgagataaaaattgaccctgataaagttgcaataaaggagacaaggtcgaaaaattcatctaaatctgctacaaataatgttcaaggtgtagatgctaacatgaataaccaaggaaataacaatggtactaatacagaagatagtttagatgagagttttgagtatgaaacaggtaagattgaaactcacactatagttgcgcctggagaacttaatagattgacagcttctgttgcaatagatggaaaaatagctaaaggtgtacaagctgatgtagaggatattgttaataatgctataggtatggatggagcgaggggagatactcttagcgttgtttcaatggtatttgacccagaagggaaggcagaagctaaacaagagctagaagagattaaaaaagaaggatttaaaaagaacataataaaagcagttattggagtagtggcagtggtagcaattggagctattggatacttaatatataagaaaagaagtgaacgagaagatatggattatgaagatgaagattatatttctaaatctgattctgttgataggaaggataatcctctattaggagatgacccagaactgacattagaggaagctgttaaaatgtatgcagaagaaaagccagaccaagtaacagagataataaaaacttggttaaatgagtaagggggatagaaagtgtccacggaaattacaaatgttaatgcgtttgacttaagtgatataaatgaaagtgataagaaagagaagatagaaggtgagggtttaaaaaaagctgctgtattattaatgacattaggaccaaatgtgtctagtgatataataaaaagcttgcctgataaacaagttcaaaaaataggtttagaaattgcaaatatttcttcaatagcttcaaaagaaagaagagaaatcttaaaagagtttgtagagataaatagggcaaaagattatgttatagaaggtgggcttgaatatgcaagagagttgttaagcaatgctttaggaaatgctaaagcaaacaaattacttgaaggtatatcaataaatacaagtacaaagccttttaaacatattataaaactagatgtaaagaaaatattagaaatacttagggatgaaagtgcacaaactatagctgttttacttgcacatatggagccagaaaatggagcagaagttttatcatacttagattttgatttacaaaatgaagtagctatgagaataagctcaatgggttcaatatctccagaagtaataaaggtaattgaaagttcattagaagataaattacactcaataagtggtgatgattttaaggattatggaggagtgtctaccttagttcaaatattgattaattctgatagaaaaacagaaaagaatattttgggaactattgaagaacaagacccggctttagcagctcaaattaaatctcatatatttgtctttgaagatattgtcaagttagatgatataagtatacaaaaagtattaaaagaagtgactatgaaagatttagtatatgccttaaagggtgtggatgatgagatttcagatgctatatatagaaatcaatcttctagagcagcagatgcacttaaagaagaaatggaaatggttggtgtcataaaagttacacaggttgaggctgctcaacaaaagatagcaaatatagtaagaaaacttgaaagagaaggtgccataactattgtaaggaattttggtggtgactttgttgaataataagattattaaaagtaaaaaagcatcatataaaggagtgctagatttaaccataatagataaagttagagtgggagaatcaaatgtaaataaagaaaatgattgtagatttagagatgaggtaataaaagaagctatagaatctgctgagataaaaaagaatgagatattagaagaagcaaaaatgaatgcacaaaatatagaaaaacaagcatatgaaaaagggtatagtcaaggtcaaaaaaatggatatgaagatggatataaagagtcatatgatgaatatacccaaaaagctaaagatgaagcagattttataaaaaatcaggcagacttaatactattacaagctaatgagaagatgactgagtacataaaagaaaaaaataaagagattgtaagacttgctattaatatggctagttctgttctaaaaaagcatttcgaagatgaagaatctatgagtgatttgttaaagcaaattattcaagattatgaaggaagtagttcatttatagtaagatgtaattctttctataaagataatatagagaaagagtttgaattattcaaagaggaaacatcactaaaatcaagtgtatttgttattgcagatgatagtatagataaaggcaatgctatcatccaaaaggaaaatggaagaataatagttggtatcgattgtgctatggaaaaactaaaagaagaattgcttggtgaataaagtatgtataaaactgatatatctatagattttgacaaaataaataagaaaatagaaaatttagaactcactatatcagaaggtagagtaaagaagataataggacttactgtagaagttgaaggaataaaagcttttgttggggagttatgtgttatatacaatcaagtcaataaaccagtgaattgtgaagtagtgggttttaaagataaagaagtcatattaatggcgttgggagagctaacattgatagctcctggttgtaaagttatttctaagggaatacctttaagtgttatgtgtagcgataatttactaggtaaagtacttgatggtcttggaaatcctatagacaactcagatgctgttttaggagatagatacaacttgaacaatgaacctcctgacccaatgaagagaaaaaagatacgaaatataatggaaacaggtgtaagagcaatagatgcatttactacttgtggtgaaggacagagaatagggatatttgcaggaagtggagtaggtaagagtacgactctaggtatgattgctaggaatgcaaaagcagatgtaaatgtaattgcccttattggagaaagaggaagagaggtactagattttattgataaagatttaggtgaagagggaatgaaaaaatctgttgttgtatgtgcaacatcagataaagctcctttggttaggctaaaaggtgctcttactgctactgcaatagcagagtattttagagaccagggaaaaaaagtaatacttatgatggattcagtaactagatttgctatggcacaaagagaagttggtatagcaataggagaaccaccagctcaaaaaggatatacaccatctgtatttgctattttaccaaaacttatggagagaacagggacatcagataaaggttctataactgcattttatacagtattagttgatggagatgactttaatgagccaatagcagatacaacaagagggatacttgatggtcatatagttttatctagagacttggcaaataagaatcattatccttctatagatgtattgaacagtttaagcagacttatgaatgagattgcttcaaaagaagacataaaaatagcatcttttgcgagagatatgcttgctgagtatagagaagcagaagatttgataaatataggtgcatatgcttcaggtacaaacaaaaaaatagatgaagcaatctactatcatgagcatattattaattttttaaaacaaggaataaatgaaaagagttcttttaatgaaactataagtagtttaagaagaatctttgaataaacaatttaaaaaaatatttgaataggttgtgatggaattggataaaaattttaagtttagattacagaaagttttagacttaaaaataaaagatgaagaagagataaaaatggaatttgctaagattcaacaaaaaaaaatagatatagagagcaatttagaaaacttagaaagtaattacagcaaatattctataagtaaaaataatgatagtgttcaaaatcaaaaaataactattaactatttgttagctttaaacaactctataatggatttatcagaagagctggataagtcgacaaatgaacttgaaaaagctagaaagcagcttataagcaaacagatagagagaaagtcattagaaaaattaaaagaaaaaaaatatggacagtattataaagaagaacagttaaaagaacaaagcactaatgatgagtttgcaagcatgagttatttgagaaatagacaagttctataaaatagtaggaagtgaggatattattgtatgaagatacaagcagattcttataatattattaaagatattgggaatagaaaaagctcatctaagaataaaaatataaaaaataataaatttgaagataatctatataaggcaacagaccataaaaaggttaaagatagaagagaaacaagtaagcaaaatgttagttcagataaacgggaaaatagtgataatgagtgtcatttagatgaagataaaagtaatcacttagaagatgaaaatacatatgaaaaagattgtagtaataataatgaagctttacatcaattactgaatcttttaaaagataattacaaaaaagataaagatataaacactatattgaataatctaaaaaaactaagtatatcagatgaattaaaacaagaacttaagcttaataaaaatatattaaataagattgcaaatcaaaatttagagttaaatagagctagtacaaataaccctaatgatatagaaaatttagacataatgaagttaagagaacttttagaaaataatgctagtgaagatattgaagtaattagtaaaactacagaaaatgatactaaaagcatagacttgtacagttttgacagcaatagaatagatactcttaactcaaataaacagaaagatgatagttctgatattttggaaaaactagcaggggtaaatggaaataagagtggaaattttggacaagtaataaataaaagcgttgatatgaataaaattaaaaatgataatgttaatttaaaacagatagaatcaaatgtaatggatgattctataaaagctattaagcatatgaaaacaaatgatatacaagaattgacaattaaattaagaccaaaagaattaggagatatgaacatacaattgttaaaagatggtgaaagtatgagagctgttgtgactgttttcaacaaagatgtctttgactctataaataaaaacatagcagatttaaagcaacatcttgaacttacaaatgtaaatataaaagatgtatcagtgcaaatgcatagcgataatacaaatacatctgatacctttgataaagcatttgaacaacagaatagacaaaataaccaagaaaacatgagtaagcaaaatacaaatgataagcgtaacaatgtagtcatagaagatgagattaaagaaaatattattgatgatgatagagtagatttactagcttagtaagggggaagtattgcatgtacggaatagcaacggctttggcaggaactcaggtaaactataggtcaaataatttaagccaacttgaaagaaatattaatgatattgccaataaacaagttagaagtaaaggaaatcagacagtaacagacaatgggactccaattataggacaaggcgatgatgctgataaagatttgtttatgaagattcttgtagcacagatgggtaatcaagacccaatgaatccacaagacccaacagaatatgtatcacaattagcacagtttgcaactttagaaaagatgtcagctatgaatgataagctagatatacttttagccttaagcaattccactctaataaattctgctttgagtatggcaacatcattaattggtaaagaagtagaagtatctggggaagaggaagaagatgaaaacattgtaggagtagtaaaatccacatatataaaagatggggaagtacacttagaattagaagtagatggaagtgacaaaactgtaggtgttaaatatgaaaaattacttaaaataggagaggtagatgcaaattcaggagaagaaaatgactcttcagaacaagaatctccagaagaagtataatattaaatgagaaaagaggtaaatttatgataaaagcaatgtattcaggtgtaagtggaatgaaagcaaatcaaacaaaactagatgtaataggtaacaatgtagccaacgctggaactacttcttttaagaaaagttcagctagaataacagattcattttatcaaactgtactatatgcaagtgctccaacagcggcattagggggaacaaacttaggacaagtaggtgtaggtagtaagatatcaagtataaataaagatatgacacaaggaaatgtacaaccaactaataggccatctgatttaatgatagatggagatggatatcttccagtagtaagacaaggaacagttatgtatacgagagatggttcttttaatttagatacaggatttaaagcagctgatggtgctttgaagaatattaaaggtggaagacttgtaaatggtgatggatatatgttacaaggtgtgatttatgatggggaatataaagctgatactggagaattcattaaaaagggtgatgctaaaggaaaagagcctattgtaataccacttcaaagtataagtcctaaggatggaacagttcaaaatgtactagagtataatatatcaaaggatggaacagtagaatttttattgagtgatggtcaaagaactcaatttgtctatgatatacctgatggtgctaaggtaggagatacacctgctggaatagataaattaaaaggtacaatacaaaaagtgcaaacatatgcattccaaaatccagcaggactagatgcagaaggaggaaacttattcaagccatcagcaaactcaggagatccacaaatagcaggagctacaggaaacataatacaaggggcaatagaagcttccaatgtagatatagcagaagaatttacagaaatgataatagcaagtaggtctttccaagcaaacagtaaaataatatcgacatcagacgaaatacttcaagaaataataaatcttaagagatagtaggtacatattatgataagagtaacggatttaaacggaagaagatacatattaaattcagaccttatagtgagaattgactctgtaccagaaagtaggattctccttacaacaggagaaaaaaatcttgtaaaagagtcagtagatgagatagtagataaagtaataaagtataaaagaaaagtaaatgtaggttatattaggagtgaaaaataatgaaaaaaacagattcactaacattcattggactaatattatctacagtattagttttatttggggcagtaaaaggaagtagttcaggattgaaaagttttttcgattttgcatctatattaatcacagtatttgggtcatttggagctttgatgattacatttactattgatgatataaaacttataaaagatgcgctacaatactcattcaagacaatgaatatatcgaaattagacttattaaatcaatttaaaacactttctaaaaaagcaagaagagaaggacttttatctatagaaagtgatgtaatgaaaatacaagacccatttatgaaaaaagggttagagttatgtattgatggccttgaagtaaatgaaataaggtctatactagaactcgaaatagattctgttgaagaaaccaataacagatattctaaactatttaaaacttgggggactttcgcacctgcatttggtatgttgggaactctaataggtttaatacaaatgttatctgaccttacatctccagatttaatagcatcgggtatgggaaaagcattaattacgacattttatggttctttacttgctaatatcgctttgaacccaattgcatataatatagatgagaagactgaaaaagagatttatgtaaaggaaatgatgctggaaggtataataagcatacaatctggggagagcagcatagtagttgaggaacgtttagctacatacctttcaaacaatgagaagctagaaattatgaaatccaataaaaatacagaaagagcaatgagtaatggcgcgtaaaaaaaataagaaaaaggatgagataaatccagatgcatggttggctacttatgcagatactataacactgattcttacattttttgtgttattgtatgctacatcagttgtagatatggaaaaatttaaaaacatagcagatgcgttaaaaggtcagttttctgggataagtatgttcagtacaggttcaagtacaagtgagaagtctccaatagagagtgttttagtggataaaaatgataagtcaaatttagaacaggatttaaaagataaagttaataattctaacttacaaaatagtgtaacagtcaaagatgatagtagagggattttactagaactagatgattcaattttatttgactctgggatttctgaattaaaagcagatagtaaagccactcttaataaagtatatgacatgataaagatgatgaaaaataagatagttatagaaggccatactgataatgtacctgtaaaatcaagtacacatgaatccaattgggatttatcttctagtagagcagtaagtgttgtaagatactttgtagaagaaaagggcatggaccctagactattttcggcaacaggatgtggagagtatcaacctttggtttcaaatgaaacagcaaagggaagggctgagaatagaagagttaatatacttataactattgactaggaggaagaggtttgttcaaaaataaaaaaattattataattattttgatactgattattttctcagcaggagcaggtttttttatattaggagaaggtggaaataaacaaattgacaagattgcaggtttgtttattccaacagggaaaggcaaagatgaagtaaagaccgaaaatcttgacttagaagagatggtattaaagctagctgatgaaggtgtaagatatttaaaagtatcaataactgtatcttatgattcttcatataaagatatagaaaaaaatacgcctttaattagggataatattataaattgttttatggcaaaaagggcagatgattttactgctgataatttaaagaacataaaagaagaaattaaaaatacattaaatatacaactaggtgaaaatgtaattcaaaatatatatttcacaaatatagtagtgcaataaaaggatggtaagacatgatactttatttactaaaaatattaatatgtatcccaataattttaatattgatagtcttatctttaaaaattagccaaggaactttattaaaaaaatataatgataaatatataaaaatactagatattgtaaatataagtaaaaacaatagcataataattttaaaaataggtgaagaaggatgcattatggcatcttcttcctctagcatgaataaaataaaagatttgaccaaagaagaaatattaagaatagaaaacgacattaaagaaagaaattttaaaattcaagattttaaaatggaaagaattaaaaagaaatatgatttcagtagatatattggaaaatttacaaaaaaggaagataagtaaatggaactattatcaaaattacctttggctgatgtaccatatacaagttcaatgcaattgtttttatttctaactgcattaatgtttttaccatttgtaatgtttatgatgacaagctttgtcagaatagttataagtttatcatttttgaaatcagcattaggagcacagcaagcaattccaagccaaattttggtagggcttgcaatagtattgacaatatttataatgagaccagtattaaatgagataaacgaaaaggcattacaaccatatatgaaagaagaagttactatggaagaagctatgaaggaagcagagggacctattaaagaatttttattaaagcaaaccagacagacagatttagatttatttgtagaacaggctggtttgaaagaaaagaaattaactcgtgaaaatataccactatctgttgtagttccagcatttgctataagtgaactaaaaactgcttttcaaataggttttttaatatatataccatttttgataatagaccttgttgtggcaagtgttttgatgtctatgggtatgtttatgttgcctccagtcatgatatcattaccgtttaagttattattatttgtaatggtggatggatggaacttgatagtaaaaacattgatattgggatttggataggagaaaaatagtatgagtgaatttatgataatgagtgttcttaaaaatggcatgtttacaggagctatgattgcagctccagtactcattgtttctcttgtagttgggcttttaataagtgtgtttcaagctacaactcaaatccaagagcaaactttgacttttgtaccaaaactaatagcaattcttttagtagtagctattggtggaagctggatgttacatactcttattagctttacttcggagatattcaatatgatgtctcttataactaaataagtaggatatatatgatttttgtatttattagaatagtggcattctttggaacactaaggatactatttccagctggtacacctgctttatttaagtcgctctttgcaatcattatatcaatattgatttcaagtactatgcaaattgaatatgcaacaaatatagacaacattgtattgtttaccttatatggtataaatgagaccataactggcattatgcttggatatataaccaatctatgtttttatagtatcagaatggcaggttctatgatggatcaacagatgggattatcaatgattaatatgtttgacccaaattcaatgactcagacaactttaattgataatcttatgaactggacagcacgtatgatattttttagcatggatggtcatcatgttttaattagaggcataaggtatagttttgagttaattccaatagggaaatcattcgtagataataatatagattatataataaacatatttgtgcagtgctttttaactggattcaaaatagcaatacctattgtactttgtctgcttatggcagattttatattagggcttatatcaagaagtgtacctcaactaaatgtaatgataattggtatgccattaaaaatactggttggtattgcgttatttatcatatcaatacctttaattgtcaatcaaataagtcatttattaagtcaaataccaaagatgtatgagggaactttcgcactagctcctatgttttttatgggttcaacagataaaacagaagaggctactccaaagaaaaagggagaacaaagaaaaaaaggtaatatagcaaagagtaaagaattacccgttgcaatgactctacttgcattcactttattagtacctacattattttcatatgtagtggatacacttaaatcttctcttaattattttttgagtctagatttttatatgaatataaattattcaagtatagagaaattagttatagcaggattaatggatttttttaagatatttttaccaatagctattccattcttagttttaggtatagtcgcaaacctatttcaagtgggaatactgtttactggtgaaactttaaaacccaatttatcaaaattaaatccagttagtggatttaaaaacatgttttctatgagaagtttgtcaaccttaataaaggatacagcgattatatctattttggcttacataggatatacattcttccaagataattatttagatatattaaagctaggtaacatatacctgccaactttaatgtacacagttaaagatttagtatattcaatattaagtaagatttgtgtagctatgatagttatagcagttgcagattatgtttatcaaagatacagtcataaaaagcaacttagaatgacaaaacaagaagttaaagatgaatataaaaactcagaaggagacccagaaataaaagctaagataaaacaaaaacaaagacaaatttcgtctcaaagaaccatgcaagcagtaccaagtgctactgtaatagtaaccaatcccacccacttatctatagcagtgagatatgaaaaagggaaagaccaagctccagtagtggtggcaaaaggtgcagattatttagcttttaaaataagggaaattgcaaagggaaatgacatacctataatagaaaataaacctattgctaggttgttatataagcaagtagaaatagaccaagaaattccagaggacatgtatcaagcttttgcagagatattagtagcagtatataaaatcaaaaatagatacaaagtcctcaaaaggtaggataagtaatgaataagtttaatttaaaggaaaatatggacgtaatagtggcatttggtgttgtagggattgttcttatgatgatagtgccgttacctacatttatattagatattttactggcaattaacataagtttatctgtgctaattttactaatgacattatttacaacaaatgtacttgatttatctatatttccaacagtgttacttgtgacaacactatttagattgggattaaatctttcatcaactagattgattttaacacagggatatgcaggtgaagttatagaggcatttggaagttttgttgtaggtggaaattacgtagtaggaataattatattcttaattatattaattgttcaatttgttgttataaccaatggttctggaagagtatctgaagtaacagctagatttacgttagatgccatgccaggtaagcagatgagtatagatgcagatttaaatgcaggagttatagatgacaaaactgctagaaaaagaagaaaagagcttcaacaagaagcagatttttatggctctatggatggagcaaataagtttgtaaagggagatgccatagcaggtcttatagtaacagcaataaacataataggtggaattgtaataggagctgtaatgctgaatatgactcttatgggtgcagcacagacatatgtaagacttactataggggatggtcttgtaagccagatacctgctctattaatatctacatcagcgggtataatcgtaacaagagcttctactgatgaaaactttggtggattagtaagtaaacagttaacggcaataccaaaagcagtaatgatgactggttgtgttctaatcgtacttggtatgatgcctggattacctaaaccagcatttttttcactaggtataggtgctatagcagcaggttactttttaggaagagaaaagaaagatactttagaagacttggagtttgaaaaacctgatatggtaaatccagataaaaatgaagtagaagatgtaacaaacttaataaatgtagaatcaatagaagtagaaattggatatggtttaatatctttagctgatgaatcagcaggaggagatttacttcagagaatagcatcaataagaagacaatgtgcaatagacatgggtatagtcgtgcaacccataagaataagagataatttacagttaaatccaaaccaatacaatataaaaataaagggaaatgtagttggtgggtatgagataatgcctaatatggttttatgtatggaccctatgaatcaaggatttagtatatttggaataaagacaattgagcctacttttggaatagaggcactttggatagaaagtgacaaggtagaagatgcagagataaagggttatacagttgtagattcatccacaatacttataactcacttactagatataataaaatcaaatgcacacgaattactgggaagacaagaagttaagactattatagatgcagcaagagaaaattatagtgctgtagtagatgaattgataccagatttaatgacacttggtgaaattcaaaaagtacttaaaaatctgttaagagaaaaagtaaatataaaggatagggttacaatacttgaaacgcttgcagaccagtctagaaatacaaaagatatagagcttcttactgaatatgtaagaatagccttggctagaagtatttgtaataatttagttgatgatgataagacaattgtagtggctacattgtctccagaaactgaagagttggtatctaataatttacaaaggtctgtaaatggaacttatccagcagttgacccagaaaatacaaataaaatatttgagagtatacaagaagtaatgaacaatgtatatttcaatcataatataccagtaatagtagtatcaccaaagataagagctccatttagaaaattagttgaaattgtatatcctaatttgactgtattatcattaaatgaaatacctaacgatattaaaatcaaagcagaaggtgtggtgagcatatatgatgacgaaaaagtatacagctaacacaattcaggatgctatgaatctagccaaaatggaattgggtgacaatattacattaatagataaaaaagaagtaagaaagtctggaatacaaggtatcttttcaaagaaagatattgaactaactattggatgggaaaagagagaaaacgtagaacaaaaagatttaaaacgagagatagaacaattaaagttaattattaacaatatggggtttgataataagaatgataatgatatagataaaatatgtaaaaatctactaagtttagaattaaatgaagaaattgtagaatctataagaattgatttgcaagaaatgaagttcaatggaattgatacaagcaaaaatttagtagaaattttaaagaaaaagattaaaatagaaaatcaagcaataaatggtaaaattgctctagtcggaccaccaggagtaggtaaaacgactacaatagcaaagttagccgcaaaattagtttttgaagaaaataaaaaagtaggagtaataactatagatacatacaggattggtgctgtagaacagttgaagatatatactgatataatgaatattccttttaaaggggtaataagtcccgatgaaatggaattggcacttgatgagatgaaagattgtgatgttgtattaatagatacaacaggtagaggctataaaaactctatgcaaatactagaaatcaaaaatcttatagataaagctgaaactgataatatacatttagttgtgaattgtacaacaagagaaagtgatacaaaagcaattatagattcatatagaaatgtgaattttaaaagcttaataattacaaagctagatgaaacaataacatatggctcaatatttaacataatgaattatgcacaaaaaccaatatcatatattacaacaggacaaaatgttcctgatgatattataaaacctaatgaagataagattataaggttactattaggagttgaaagtatatgatagaccaagctcaaattttgagaaaaatggcaatggaaaaaagaggacttgatgagtttatagtagagaatgagaatgtacctaagataattacaatagcttctggtaaaggcggtgttggaaagagtaatctcgctacaaatttgtctatatgcttgaccaaacttaataaaaaagttcttatattagatgcagacataggaatgtctaatatagatataataatgggggtaaatgtaaaagggactataattgatgtaattaatggcgaaaaaaatatagaagatataatttcacagactaagtatggtgtaaatataatatctggaggttctgcccttaatcatatagaagactttacagaagctcaaagaaataagtttatacatagcatagaacagattcacgatgtggattttataataattgatacaggagctggtatgagcaaaagcctattgtcatttatatactgtagtactgaatttttcttaataacaactccagaaccgacatcattgactgacgcatatagtttattaaaagctataagtaattttggcataaagagaagtgcaaatataataatcaatagggtaattgatttagaagaagcaaaatctacatacaaaagaataaaaatggttgtggacaaatttctaaaccttaatctagaattgtatggatatataatagatgacaaaaaagtaagtttatgtgtaaaaaaacagataccattcattttagaatatcctacaagtattgcatcaaaatgtattatagccatagcaaagagaatggtaagtcagtcaagagaagatattgttgataataaaagttttctaagaaagatgtttagtatatttaaaagctaaggaggcgtagttaatgaatagagaagaattaataaaagagaatatgcctcttgtaaagagtatagcaagaaaattttttataccagggaaaggttttgaatatcaagacttagtaaatagtggagtcattggattgattgatgcaataaataaatttgatgctgaaaagggggcaaagttttctagttactcttatataaaaataaaatctgctatattagatgaaattagaaatcaaagtccaatttctaaacataatctaactaaagtaaataagtataatagagtggtagaaaagttgcaatctaaattattaagagagccaacttcatatgaaattgcaaaagaattaaatgtttcagaaaaagaacttcatgatatcgaaagtaatatagacatgttaaatattgtatcattaaactatgtaatctttgaagatacaaatgaaactgtacaagatgtaataagtgatagagaagaggaagctccagaaaatataatagaagaagaagaaaagttagagattctatctaaagcaattagtaatttaaatgaaagagaaaaattaatactttcactgtactattatgaagatttaaatctaaaggagatagggaaagtgctaggtgtttcagaatcaagagtttcacaactccacagaaaatcaataagaaacttaagaaacaagataaaagaacttaaatattctatatagatggtgattgataagatgatacaaattatattaatagtagtgtctattttaataatagtaactatagttataaatttacataaggaatcaaaaaataaagataacagatactttgataaaatatttgagcaagaatatgaagcaaatgatagattaataattgcagaaaaaagaagattctttttagacaaagtacttgctgaaataagaagtaataatcatataaaagtttatgaaaattataacctaataaaggctaatgaagaaagaaaggaaaacatatttatagaatcaaaaaaggaagtaagacaagaaaatgagttatctcttaaagtgaaacatcttataagttcaggttatgatgatgtggaaatatgtaagatgctagatattggaaagggggaactgtcattaataaggagttgttacaaaatataaggatattattatgtgataaaaaagtattcttaggaataggtattggtatattaatatcaactttatgcataatgctttttagtaataatgatatgagtaaggcagagatagaaaaaaaggccagagcgttaggcatgaaatatacaagtgagatgaaagttttagaatagatgatactgtttagacatttacaaaaaaggaggtcataatgtgataagaggattatatacagcagtttctgctatgataactaatcaacaaaagcaaaatgttgttgtcaataacctagctaatatggatacaaatggatataaaagtaaacaacttttgactaaaagttttgatgaattaaagttggagggttacaataactacgcaaatggaactaaacaaaagcagattataggcgatataagtccaggtatttctatggatgaaactatcacaaattttaatcaaggacctataaaaactactgataataaaatggatgtagctattcaaggtaagggattttttctagttagtgatgcagctggaaatcaattttacactagaaatgggaacttcagaacagacaatcaaggtgaccttataacaagtgaagggtattatgtacttgggacgaatactgctactggtgctgtaggtcatataaatgtaggaaatcaaaaatttgaagtggcaaaagataatacaatatcactagatggaaatgctatgtataaattcaatattgtagattttaatgactacaataacttaaaaaaagaaggagataacttgtattctggaggaggagctatgaaagtaaataatgcacttacaatacaaagtgcgatagagtcttctaatgtagatatggtatctgaaattaataatatgatgaccatatcaagagaatatgaggcaaatcaaaagataattcaggctatggattctaaattagcaaaaatagcaagtgagattggttcagtaagataggtgataggaggtgaatttttatgtacacaatgttttatactagtaaaacagctttatcagcaaatcaaagtaaactagatataatatctaacaatatagcaaattctgattcaacaggatataaaaaaataaatatggaatattctgatttagtggatgaagtactaaatagaccatcatatcctacaaatggcaatgatatatcgactggaacaggagctaaggcaacagctcccatgagaatttatgaacaaggtgcattggcccctacagatagtaagagtaatttggcgatagatggagaaggattctttagagtgataagaaaagatggtacatatgcatatacaagaaatggtggatttaatatagatggtttaggtaagattgtagatgataatggaaatatattagatgttcaatttgatgcaggatataactataataatacgaatatagatagcacaaacttaacagtttcaagaaatggcgagttattcgtagataataaaaaaataggaaaaatcaatttatatcaacctataggaactcaaaattttatatctgaaggagatagtttattcgtcgcaactgatgcagcacagattaaacaagttgagaaagtagatatagttcaaggctatagagagaggtcaaatgtttctttacaagaagaatttgttgacttaatagccactcaaagagcatttcaaatgaactcaaagggaataaagacagcagatgaaatgtggcaaatagctaataatttaagagctaaataattatgtaaggtgaggaatattcatgaatgatatgaaagagtacgattttggcaaacctcagagttattcaagagaaaatttaacttgtttaaattttttattagctgaattttgtaaaaaatataaaaactatataatttatgaacttaagtgtaattctagtatgattgttgatagtatagaccaagtaaattatcagacttttttagatagagtaacttcttcatgtgtagtagtacaaaatgcaatggaacctgttatgaaaaacttttcttttagaatagatagaagtgtagctgatatgtggattgatataacttctggaggaactggagttataaaggataatgatagagagcttacagaacttgataaaaaagtgcttttacatcttatggatgatttagtaagaaatatgcacttatttgaaggttttgaaaatatacaagtattggatacacatacacatattaatttaccacaattatgttctccaactgcaccagtatgcgttgtagatttaaaagtgctaaatgataatgagtatattggaagtgtttctctttgttttccgtataatggtttagaggctctattagaaagtatatctgttatagaattttttgataatgatgtaggagatgattcagaggaatttaccaaaaaaatctataatagtgtatctaatatagaattatcagttattgcagagataggaaaagtatcaattaatgttgaagacttacttaaactagaagttggagatgtaatagtaacaaataaaaaaataaatgattatatagatatatttgtagaaaattcaaaatcatatacagcaacaccaggatttatatcaagcaaaaaaggtgtaaaaataaatgatgctgttggaaaagaggtgtagttatggacaatagtaatcttatttcagatgaagaagcaaagatgttattaaatgataaagttgaaagtgaagttgatggggatgatgagttagccttagatgtctctgaagttaatcgaaataatatacaaaggatacttgaccttaagttagaattatctgtagttatagggagaactaagatgactctaagagatattttaaatttacataaaggttctcttattgaactgaatactttagcagaccaagatgtggaaatactaatagataataaggttttggcttatggaaaagtagtggtggtagatttaaattttggtgtaaagataacaagtatagtaagtgaagaagacatggtaaaatctcttgtttagagataacatcaattaatacttaaggcatgaggtggtacttattttaaacttaaatgatataaaaaaagatatactaaaactcaataaaaaagactcatgttctctatataatgaatctattaataatataaataataattgtatatcaactggattaaaatttttaaaacaagcaagagatttaaacccagatgatgttgatatattaaatctcacaggtcttgtaaacttactaaaatgtaattttgatgatgctgtagaaagtttctataagagttcactttgtgaaaaaactgctctgtgtgaaaagtatataaacatgcttacatctgaggagtttttaattttctttgaaaagtacaatcaacttataaggttaataaataaaggaatgtataaagaagctatacaagggtttaaacttataactgaccaatactgtgatttaatagaaccttatgagttgcttgccttactgtatgacaaggaagaagaatatataaaatttgatgaatgtttagaagtattgaagattattgataaggaaaattatttattaaatcaagaaaataacacattagatatgtataatagtgctaatatacaaactaaaagtaatgtaaaagtagatgattataagaatgagtttttacataaaagtagtagtaaccataaaattaatgattataataatgtaactaaagaaaaaagttcaagcaaaaaccagaaaagttcagattctaataagaaaaaaagtattaaaaaaaataagtacctatatatagccataatattaggaatattattagtaggacaaagtatatatagttcttataagatgaataatttaactgataaaatatctaaaaataatgaaactaaaaatgaagagtcaatagattctaacttgactaagaaagaaaataatatagaagaaaatgaagatatgagtaaggcttctaatataaataagagtaataaaaacattaataaagaggctgatgtaaaatctaaaaaaaatactgtagaaaatgaagatgataaagattctgacttatttacagaggatgaattgatgtctaaggcgaatactttaaaatcagaaaaaaaaactaaatcttctatacaactatataagaaagttgcagatataggtgaaaataaagggaatacatctgaagcaacttatcaagttgctattctcagtgaaaagttaaaagactataaaactgctgaagaatattataaaatgtatgtagaaaattactcagaaaaagatgcttattttgatgaatcttattataatttagggatgatgtactataacaatggtgatttaaaaaattctaaattgacattaaagaagttagttaataaggtaccaaatagtatgtataataattcaaaagtaaaagaaattttaaaagaagaatagttaaattagataagaaaaataaattattttattttaaaataatatgattataatatattgacataccattttaaaaaatttaaaatattaattataaaatgaggagggataaaaaatggaatttgaaaaagggagtatttcaattcatacagaaaatatttttcctataattaaaaaatggttatactctgataaagacatatttataagagagcttataagtaatggatgtgatgcagtaagcaaacacaaaagacttgtatcactaggagaaatatcagaaaataagtcatcagattataaaattacagtatctgtaaataaaggagaaggtacacttaaatttattgacaatggaattggtatgactgaagaagagataaaaaaatacataaatcaagttgctttttcaggtgctgaagatttctttaataaatataaggataagatggaagagtcaaatgacataataggtcattttggattaggattttattctgcatttatggtgtctaaaaaggtacaaatagatacactttcatatacagaaggagcgactcctgtaagatggatatctgaaggtggtacagaatacgaaatatctgaatcagatgctagaaatgatagaggaactactataacactatttattgatgatgatagtaaagaatttttagatgaatttactgtaagaggaataataaataaatactgttctttcttaccagtagaaatatatttagaagatgttgaaagattagaaagagaagctaaagaagcagaagaaaaagctaaaaaacaaaaggaagatggaaaagaagagattgtagatgcaaaagtaattgagcctttaaacgacactaatcctctatggttaaaatctccaaaagactgtactgatgaggagtataaagagttttatagaaaggtattcaatgtatttgatgaacctttattttggatacatttaaatgtagattatcctttcaatttaaagggtatactttacttccctaaattaaaaaatgagtttgaactgactgaaggaaaagtaaaattatacaacaatcaagtgtttgtggctgacaatataaaagaagttataccagaatttttacttttattaaaaggtgttatagactgcccagacttaccattaaatgtatcaagaagtttcttacaaaatgacagggatgtaagcaaaatttctaaacatataattaaaaaagtagctgataagttaaaatctctttgtaaaaatgaaagagaagaatacaataagttttgggatgatatacaaatatttattaaatatggttgcttaaaagatgaaagtttctatgagaaggtaaaagaatgtatattattcaaaactattgatgatgagtatataacaatacaagattatttagaaaaatgtaaggacaaacatgaaaataaggtattttatgtaagtgataaggaacagcaatctcaatacattaaactatttaaagaatacgacttaagtgctgttgttttaaactcatcaatagatactcattttatttcatttatggaatataaagagaatggagttaagtttaatagaatagatgcagacctttctgatgtattaaaagataaaaatgaaaataaagatagtgaagaaaacaaagaagagatagctaagatagaaggtttgtttaaagaagctgttggagaaagagtgaagaattattctgtagaaggattgaaaaatgaagacactccagctatggtattagtatcagaacaatctattagaatggcagaaatgcagtcaagatttgctggaatggatttaggaatgaattttgaggaagaaaaaactcttgtaataaatgagaacagtccaataatcaaaaaattggtttctcttaaagatgatgaggaaaagaaagataagattacgcttatttgtaaccagatagcagatttagctttactttctaataaagaattaaagccagatgagttagattcatttgtacaaagaagtaataagcttatgagtcttttgatagaattataagattgaatttgaatacattgaagcaaatttataaaaagtattcaatatcagtgatgagaaagaagtgtctcaaaatgaacttttcagttcatgaggcgctttttttatgtgaaattaaatttattttaatcatttcaacaatgaaaaatatatttatctctattttgagacagaccgttctttatttttttatctttggttaatttttaaatatttaagtaggttctaataaaaaactctatttagttaaatatagttaacttgatatataataagataatacatataattaagtaaaagattgttttttagtttatgtttaaatacataattacactttgttaaaaacataaaattattactaaagtagaaataggaggttttagcatgaattttaattataatttgccagtaaatatcttatttgggagaggcagaattaatgatgtgggaaaagaagtatctaaatatggcaaaaaagtattgatagtaacaggtaaaaatagtacaaagaaaactggattacttgataaaacaatagatttactaaaagactctaaaatagaatatgaagtttttgatagagtagaacaaaatcctcttataactactatatattcaggcgtagaaattataaaatcaactggatgtgattgtgttttagggcttggtggtggaagcattatggatgctgccaagagtatagctttttcttataaaaacccaggagatttaaatgattatatatttggaattagacaaggtgaagaagctttacctataatcttagttccaacaacatcaggtacaggtagtgaaggaaattgttttgcagtacttacaaattcagaaactaaagataaaaaatctataaagaagaatagtatgtatgcaaaagcatcaataattgacccagaacttatggttacaatgccaaagcatataattgcatcagttggatttgatgcacttgcccataatatggaagcatatctttctaatggaagaaaccctcttgcagatgtacaagctatttatgggattgaacttatatcagaaaacctaataaaggtatataatgatgttaatgatttagaagcatgggaaaaaataacacttgcaagtactattggaggaatgacgattggtacagcgggtacagccttgccacatggaatggagcatcctgtaagtggtcttagagatgtaatgcatggaaaaggacttgcagcgttgactcctactattatagaaagttcatgggatattgatattgaaagatttggtaatatttcaaaggtattaggaggaacttgtgcagaagattgttcagatgcaattagaaatttccttaaaaaaatagatttagatataaaactaagtgatttaggtattgaaaaatcagatatagattggttaactgataattgtatgaaaatatcagttgcaaatattaagagacatccaaagtattttaataaggaacaaataaaggaaatgtaccataagtctttataatttgactttacatatttagttttatataaaaattataaattaataataaaaaattataagtaattaatagtaaaaaaattgtgtatagaagttatatatataataaacttgtcttaagcttttattttactttctaataaataaaggagtttaaaaaagggaagattaattaagtaatattttataaaattcttcgatttaaaaactttaagtagaggtgaaataaatgtttaatcccaaaagaataatattcgaaaaaggaactttagacactgatgtgggcaaaaaaatatacaataaatttagagataataaagatgtagagataattaatatatcatcaaataggattaaagaacacattccaggtgaaaatctatatgaacaatatagaagtgggaagcagactatggtagttgggattagaaaaagtctgaagtttcaaacatgtaaaccttctgctaattatcaactaccacttgtcagtggatgtatgggaagatgtgagtattgttatttgaacacacaattaggtgataaaccatttataagggtgtttgtaaatgtagatgaaatacttgaacagacaaaaaaatatattgaagatagaaagccacaggtaaccatatttgaaggggcagctacatcagacccagttccagtagagccatatactaattctttgaagaaaacaatagagttttttggaagagaggaaaaaggaagatttagatttgttactaaatacagtgatgtggatagcttattggatgctgaacataataatcatacagaaatacgatttagtatcaatactcctagaattataaatgaacatgagcattatacagcctctgcaaataaaagaatagagtcagctgtaaaacttgctagggctggttatcagattggtttcataatagcacctgtgtttttatatgaaggttggaaagaagagtataaaaatctgattataagtataaaagaagctttaccaaaggattttgataaaaaaattatatttgaagttatatctcatagatatacaactaaagcaaaaaatagaatactagagatttatccagatacactattgccaatggaaaatgaggatagaaagtttaaatacggtcaatttggatatggtaagtacgtgtatgataaagaacaattagatgatatgaaagagttctttcttaaggaaataaatggagtatttaaaaatagtttaataaaatatataatatagcaaatcttacctaaagatttgctatattttatttttatatattttatgtttataataaagcaatgagatttagcactatcatataagaaaattaaaaagggcactatctatcaagaacattttttctagttttgatactataaagggtaagagtaacaaaaatatcaggaggagttatagtatgcatgcatgggagtctattcaaattacattggatttaatagaagcaaatttatcagaagaaatatcaattaatgaattagcaaataaagcaaatttatcaccattttactatcaaagactatttaaaagattggtaaataagactgtaatggagtatataaagcttcgtcgtcttgcaagagcttctgaatacttagcagaacataagaatcgtatacttgatgtagctttaaattttggatttgctagtcatgagacatttacacgttcctttaaaaaagcatatggattaactccagaaaaatatagagcaaatccagtaaaactcaatcactttattaagccagaattaattttaaattatgctatggttgatgaaggtgttccactgattgcagatgatatagtgattgaagtcaatcgtaagacattgagtaatccaaggacatttgttggaatagaaatagaagtacctatttgccagttggtgggtggtgaaacaactggaattgcaatagtagaggaattatggatgaaacttggaagtcaaagacataatataccaaatcaaattccaggtggaaatgaatttgctgctctttatatgggaaatgcaaaagaaggaaattgtatgtatatggcaggtgtagaggtagagtcaggtacatcagtagaaggatataatacttttgagttgccagctaaagaatatttagtatgtggatttgaggcagaaaactttaatgagttagttaattcagctgtttttaaagcagataaatttatggaaagatggatgaagaaacataatttaacaactactgattttgcaattgagatgtattaccccactacacctgaagcagcatatctggaacattggattgttccggttcctattgaacaatagaaaggatgatgaatatgaattggcaagatgcgttttttcaagatactaaacctacatttgagcaaattaatgaatttattaataatccattatgggacaagttaaataaaactttggtttctacttataatgtagaacctaagcttgaatacagtaaatgttcaatgcaaagaggttggaatgtaaaatataaaaaaagaggtaaatcactatgtactttatatccacaagaaggttattttaaagctttggttattgtaagtgaaagcaatagagtagaggttgatttatttattaatacttgttgtgattatatcaaaaaaatatataatgaggtaaacttttttaatggaagtaaatggctaatgattcaagtagatagtttattggtattaaacgatatgcttgaactaattaaatttagagcttaacatatagaacaggatgaatatataagtcatcctgtttttatattcaatcagataaattaatatatagtctataatatgaataatttagtaaatttactttatctttctacattctttgcaactaagtccacatgtgtttttttcttgcatattagtagcaccccaattagcaaattgttgtaaaataggcacaatacttttacctttacttgttaatgtatactcaacttttggaggaatttcattatattgtttacgatgaacaataccagtagactctaaatcttttaatgattgagctagcatagtatttgtaatgccatccaattttctttttatgctactatatctaattggattttcaactgctaacatacatataataggtaatttccacttaccaccgacaatgtctaatgcataacggattggacaggttaattcttcaacgtttttagttatatttttttcagtatttatactcattttaattactccttagttatagtagtatcttttttatactttatcagaaaaaactgcatacttgttttttctgtattttatattaaaattatatcaaaggataatccttaatacaagtatttaaaaggggtgtaagaattatgaaagcattagaatttttgaacaaggcaggagtttattatttagcaacagttgatgagaacaatcaagcacatgtgcgtcctttaggatttgttatggaatacaatggtaaacttacattttgcacatctaatcaaaaggatatgtttaagcaacttatttttaatccaaaggttgaactttgttgtatagaccaaaaccttaatactctacgtattttaggtgaagcagtatttgttacatcaaaagaaacacaagctaaggcacttgaaataatgccaagtttaggtcagatgtactctgtgggagatggtaagtttgaaatattctctattgataaggcaaaagttagttgttgttcaatgagtggtaaaaagattgatgtagagctttaattataattgaatcgacatccatagtgaaaattaagaaaacgttattactgaaatattgatagatttaatttaagtgcaataaaaagatttttaaataatgaatatgtaaaaatttttagttattagatgtgtatttcaataatgatatactattttgaataattacatactagaaataagataattaaaatttactttataatgggatagatttcttttaaaaaatattttaactataattgatttttatttaatctgaaaaaaatattatgactataaaaaattgctacttattatttggatatttttgtatataaataataagtagcatgactttatacattaataatgatagaatataaattaatagataagatataattttaaaaggagtgatataatatgagtaaatatagttctttatgggaatatgttaagaaaaataatagtcaatcgtttaaattaacttttgaagaaataaaagatattgctggaatagagatagaccattcgtttttgaaatataaaaaagaattaaatgaatatggatatcaagtaggaaaaatctctttaaaagagaagactgttattttcaataaaattgattaagatataaataattacatataataaaataatttgtattgacgattattacaaataaaaataaagtaaatcttatataagatttactttatttttagatgatatttttttagctttatactataaggtatataaaactaagcctattaaaaatgttataatttctattaccatcatagaccatatcaatccatcaagttcataaaagtaattaagctttattaaatagcttctttattataatttctttatttcatataatataaatagtattaaaatttttatgggagttaaagtaagcatgtattattacttagatatttgtataatcaacatctagtaatttacctttttggtgaaaatgattaataagttttttaggataattcattattaattcatctggaaaattaatttcctttaagatattctcagaatactcatagttacctatgtcaaaacaaatgtgagcatctgaagttagtatgattttagcaccatattttttgcaaagtgtagcaatatacttacagttatccgagctaccatttcttgacacgcctttaatagaacaattatttatttctattaagatattcttttctatagctaatttaatgattaattcatagtcgattgggtagtttgggtttccaaggtgtcctaatatttcaatattatcatgcttatttattgcatttattaaagctttagtattattctctaatgtatttggagaaaaaacagcttcgtgaaatgacaagataagataatctaaccgaggaattacaaaaggctctaggtctatgtttcctttaatatctagtatatttgcttcacagcctcttaaaattataatgttatttatgattcttgggatattttgaatgttgtgaaagtaccatctgtggggagaaccaggcatcttaggaccatgttcagatgtacctagtatcttaattccattttctttacaataattaatattttctagtaaagtgctatagccatgaccactgactatagagtgggtgtgtaaatctgataaaaaattcatataaattcctcctctataaaagatgagggtaacgtaatttatattataaaacgaataggaaagaaaatcaatagttacataattagacaaaaatattaaaatattgtagaattaagcttaataataaatgtttaacagtattactgcttataggggaggttaactatgacacaaaagaagctatcaaggaaagaaaaagttttaatttgcttgaaaaggttaacagaagaacacttgaactttaataatggcattagatttggatttgatgcagaatatatagctactgaagtaggtataaatagaagtaatgctagtaaggaattaaatcaattaataaaagaaagtattattataaagataaagggtaagcctgttcagtacttatataaagaaagtattgagagtattttgggaaagaaactaaataaagggatatttgataatattaactctataaacgaatatagtgaaaatgattctatcaaagatgagtatattttagagagtataaaaaaagagaacaatatttttaatttagtaggatgtgatggaagtttaaggtcccaaatagaacaggctaaagcagcagtaatatatccacctaaggggttgagtacattaataataggacctacaggagttggtaaatctatatttgcagaatatatgtataagtatagtttaactataaaagaagatagtgataatgcaccatttatcatatttaactgtgctgattattctgataatcagcaattattattagcgcagctttttggatatgtaaaaggagcatttactggagctgataaagataagtatggtattgtacatgaagctaataatggagtattgtttttagatgaagttcatagattatctgcagagggacaagaaatgctatttctgcttatggataaagggatatatagaaggttaggagaggctaataaggtacacgagtgtagagttatgataattgcagccactacagaagacccagaaacagcaatgttggaaacgtttttaagaagaatacctgtaactataaagattccgtctttagaggaaagaggctttcaagagagaatgaagcttatatgttatttttttaaagaagagagtgttaggattggtgttaagttaaaggtttcaaaagaagttattaaggcatttattttatataagtgtaagggaaacataggccaattaaaaagcgatatacaattaatttgtgcaagagcttttttagattatatgacctataaaagggaatgtgtatatgtaaggctctctcttctaccaaataatattagagaatcattatatggaaataatagaaaagaggagtttgtacaaaatttcagttttattggaaaagatgatattatttttttaccagaagaaaaggattttgaaagtgaaaatttattaatagaaaataaaaaatatgatttagatttttatggaatgataaaagaaacttggaataaacttcaacaagaaggtattaaagagtcacaaattagaagtgttatagatggagacatacagaagtattcctataatttaatgaatacttttatatataataatagtaatcaaacagcttataacaacattgttaatgattcaattgcaactactgtaaaatatattttacaaaagcatgataaatggagcaaaagagaaggattagataaattaataaaagctatagccttacatattcagaatttaattgaaagaataaagattggaaatatagtaaagcatcctaataaagatgaaattatgaaggaaagagcatatgaatataacatagcaaaagaaatattatctaacatgtcattaatgtatggagtagagtttccagaagatgaagcaatttttttagcaacatttctttatttatcgtatgtgggattaaatgaggagagtatagcaatattagtcataatgcatggtgaatctacagcatctagcatggtgaatgtagccaatactttactggattgtaaccatgcagtggcaattaatatgggattagaagatagagttcaggatattttagtacaagctgtagaaatagccaataaaattgataaaggaaagggaattttaattttaactgatatggggtctattttaacatttgctaaagttattcgtgatgctacaggaaaagaagtaaaagcagtagatatggtaagtacacctattgtaatagaagcaactagaaaggctctaactccagaaatgacattagagaaattatattttaatattatagaatctataaagaaacattatggagatatggaagttacatatgctgaaaaagataatggtggtagatattttgatagactactaattgataatattagtaaaactttgacttttttaaatggggaaaaggcttattttatattaaaagaagtaattaatagaattagtgaacactattctttagtaattcaagatgaacttttagtaaagtttatatttcattgttcatgtatgattgaaagagtaataataaaagagtctttagtttataaatcatatgaagaaagaattagtagaaataaagaattatatttagttataaaagaaagttttaagctagtagaagagacattcgatataattatttcagatatggaatatgcaaatatattagatatatttgaatcacaatatgatacagataaattcaaaagttgatacaaaatttaaaaatagccaaaaggctatcttttttttactttttttgatacagatttgatacaggttgaaaaaatcttttgatacatatcgaaataataagtttttaaaaaaaattgagtaaaaagttttgattaaatcctgtaaaatagccatttattattgatacacataagttggcacggcaattgcttatataaaaagtgacaagaaaagtgaggtgaaattggtgataggaataatagttatgactcatgggagttttagtgaagaaattataaaaagctgtgaacttattgcaggaccagcagaaagaacagcagcaattaaactaaataggaatgataatattgaagacttaaataaaaattttgtagaaaagttaaatgaattagatgaaggtgacggagttttagtattagctgacctattaggaggttcgccaagtaatgttgcaagtttaaaccttaaaaaaggtggcaagtttcatgcacttactggagtaaatcttccaatgctacttgaagctttaattaatagagagggaaaaagtttagaagagttagcagaagcatgtattgaagcaggacaaactggtataaacaatattaataaagttcttagctcaatgtaatagaaaaaggagtttgattaaaaatgtctttagtaaaatattgcagatgtgatgatagattaatacatggtcaagtgatatataaatgggttaagcatctaggtgtaaaaaagatagtagtagtagatgatgaaacaaccaatgatgttattgctaaaggtttgataaaaatggcagcaccaaagaatattgatttatcaatattaactgtaagtgaatcaaggagatatttttataataatcaagctgatgataacgtttttgtattaattaaaaatttagatactgcaaatagaatgatagaagaagggattaatatcaaaaaacttattgttggaagaatacctacaggaataggaaaaaagaaaatatctcaaaatgtatacattaataaaaaagagtttcttttaatagatgaatttattaaaaagaatattaatgtatcaattcaaatggtacctgatgaagaagaagtagaattaaaccaaaatattaatcgctataaaggagagtttatttagcaatgaataaatataaggtaattatactgtgccatggaacttggggaaaagtcttagtagaagaaacaaataaaaactttggattgtcaaatcaatatgaagttttatcactaagttctgaaaaagatgtttctgtatttatgaaagaggttgaagaagtagtagataaagaagatgtgaaaattataatatcagatttatatggaggatctacatcaagtgttgcaatagctgttgctataagaagaggaatagatgcaataaatggacttagcttacagacaattttaatcgtagatgaagaattaagcaaagaagataaattacatacattaccagaaagaatcgtcaaaaaaaataataacctttgtgtggatttaattaaagaatttaaaaaaatataaattatgaggtgaatataatggcaaaaataacattagtaagagtagaccacagattaattcatgggcaagttataacaaaatgggtaaaaatcgctcaagctcaaaaaataataatagttgatgacttcttaggtcaagatgaatttatggctgacatatataaaatggcagcaccatcaggagtagaagtagttattttaacagcagaagatgcgggacaagcattccaaaacaacactttaggagataaaaatatatttattctatttaaaaatgttgatatggcaaataaggcttataaagctggacttaaatatgaaaagattcaattaggaggtattccaaatgaagcaggaaagaaaatggtgtttacagctgtttcattaggaaatgaggatgtagaacaacttaatgaacttaatgaaaatggggttgaaatagtcctacaagttataccagaggaatcatctatgacatatgaaaatgcgttaaagaaatttaaataaaaaatataaattaggaggaattataaatggaatctgttttgatgttggcaattgtaacaggattatggtattggtttgcagcaggtcttgcagggtatacccttttctcaacactaaagtctcctttatttataggttttagccttggattactttggggtgatgtaacaactggtatgattgttggtgcaagtatagaaatggtttatctaggaatggtcgcagcagggggaaatattccatcagataaatgtctagctgctcttattgcaataccagtagcacttcaaactggtgttaatgcagaagttgcagtatctattgcggtacctttaggtgttataggagtattagttaataacttaagaagaactggtaatgctgtattggttcataaggcagataagtatgctgaagaaggtaatacaaaaggcatctggagatgtgcaacactttattctttaatatttgggtttgttttaagatttccaatagtttttgtatgtaacttttttggagcagatttagttcaatcattattagatgttataccacaatggttaatgaatggattaacagtaatgggcggtatattacctgcattaggttttgcaacaacaatatttactataggtaaaaataaattcttaccaatgtttattataggattttttatggttcaatattttgaaatatcaattactgcagctgcaatatttggtgtttgtatagctcttttaattacctttatgaaagaagacaaaagggtaggtgaagtataatgcaagaaataaaaaataaagaagttaaaaatggacaaggtccaactgaagttaataagacaagagtactcacaaagaaagatgtaacaaaaacatacctaagatggtggtggacagcagagttatctaattcttttgaaagaatgcaagcattagcagtttgtgcaagtttcactccggctttagaaaagttatataagaaaaaagaagatttagtagatgcattaaagagacacttacaattttttaatactcaagctatatggggaggattaattcatggtacagttttagctatggaagaagagaaagctactgaaggaaaaatcccaggagaagttatttcaggtgttaagaatggtcttatgggacctttggctggaattggagatactttagattttggtacatttcaaacaatattcttagctttaggtgcttcatttggagcagaaggaagtgttataggtgcatttttcccaataatgtttagtatattactattttgcgaaggttattacttatttcatttaggatattctttaggtagagattcaattaagaaaattctatcaggtggtattgtcaataagataattgatggtgcttcaattctaggaatgtttatgatgggagcattatctgcaactacagttaagctttcaactccgctatcatttgatattggtggtaaagcaattgttgttcaagatacattaaatatgattgctccaggtttattaccacttggtgttgtattcttcgtatattggggaatgaaatacaagaagtggacaataactaagttattagtaattttagttgtattagcattggtaggatcattcattggaatattctaattcacagtgattaaaatatagaatttaattttaggaggagaaagaaatgtcagaaaaaatgtatacagaaaaggaatatttagaaggaattagaggagcaacaggagaaagagcagtatggttctatcttcttatgaaagaagctgaaaaattaggagctaatccagatgatatatgtaaagaagcaatatatggatttggtaaaatgagaggtcaaaaatataacgtagcagatactccaggaaaaatggcagaaatgttatataacagtaaaggacaaaaagtgtttgaaatggaattagtagaaaatacagatgagaatggcgttttaaaattccatcactgtccattagatgctgcttggaaagaatatggattaactaaagaagaaagaaaagaaatttgtagattagcttgttatggggattatggaagagttgactgtgcacaaggtgttaaattagattttgctcaaaaatgtgctcatgatgatgaagtttgtgaattagtatttacaaaaaaataatttttaatgctaaaagcctgttctttaaggacaggctttaaaaagatagaaagtaggttgatttatggatataagcagaagtgtagataatagtttaaatagaaccatagaatttctaaaagaattgataaaaattgattcacaacaaggtgaacctatttcacaatgtccttttggtataggacctaaaaaatctttagataaaactttagattactgtgctagtttaggttttagtgttaaaaatattgataattatattggatatgcagaaattggagagggagaggaattaatagggattccaatgcatttagatatagttccaccaggagaggggtggagtgtagacccattttcgggagcagtaattgacaatattatttatggaagaggtgtcatagataataagggtgctgtatctatgcttatacatgtattgaaaaacatagaggatatgtatcctacaattaataaaagaataagattaatttttggtacaaatgaggagacagatatgaaatgtatcaaatattacttagataaaggtgaagaaattccaagtatgggatttactccagatgctatgtatccagtggttaatggagaaaaaggaagggttcatataaggatagaaaaagaaattaaaattgacaaaagtaaaccttacataatagtaaggggaggaactaaagaaaatgttgttccatctcattgtactgcaaaaattattaatggaattatttcagagttaactactaaaggagtagctgtacatgcaagtaatcctgaaaagggagaaaatgctatatctaaaatggtaataaagatagttgaggataatatggattttcagcatagagaagatatagaattagtttcaaaatacctttgtagtgattattatggagatgcattggggattaatcaatatgatgaggtattcaaaaacactaccttaaatttaggaatattaaaagtaaatgaggaaaaaatcgtatgtgagttagatataaggtatggtaaaaatatagttttaaataacataatagatagattcaaaaaggttttttgtaatggttggaaaatagaggttattgctcataaagacttacattatgtggatgagagtaatttagtacttaaaaaattattagaagcctatgaagaagtaacagatgaaaatggatatacaattgctatgggtggtggcacatatgcaagttggtttaaagatatggtggcgtttggacctaagttcttagcgtataaaactggtggtcatggagtagatgaaagagtaccaataaatcatatacgaaagaatatggagatatatactttggctttaataaaactattagaattgtaaaagaagaagagactttatgtgcaaatttacagatatcttaaaaagagagataaaacgagttcaactttatttaaatgttcaacaccatcaaatggggctgtctcaaaatagagataagcctcttgcttattattgaaatgatgaaaatatattttacttcatacaaaaaagagtgccttatgaagtaaaaagttaattttgagacaccctcatttgatgatgttgaagagaaaataagtatgaaattattaaaaaaagatgattttataaaagttaaggttgaaaataaaagttaattgaatggaattagataaatggagaaggctgtatactatctaataaaataacaaaagagtgttataaaactggttatatgattagagaaaagtctattgatacttatccagatagtggacggggatttatgacttgggatgaaaatggagaataataaaaattatagtttatacaatttaataagatatatgtacaagcagttaatctaaatgattgactgcttttcttttatagatttttatataatagacaattactaatacatgatagttgcctgttataattagaggaatagatacgaataataactttataaaagaattaaatggaaaattgaagagttatattcaggattttaaaaagaatatgaaatgagaaatgaaaataaggtgtttatattaaaagaggttttacacaaaatacttaaaaacgtgataaataaaaactgtatttagataaattaactactagttttatatataatatggattttgtttacaaagtttacatatttcacaaaatatttttaaaatatatttaaaaatatattttatatacttgttcgtttgtttctctgtggttgattttttcgtcaaaagtcaacttcaaatcgcttgttagctttacatgtttaaggatataattatacataaggagggattgacatgaatgaattaaacatcgcaaaaacgctgattttaaagcgtaaagaaaaaggaattacacaagatgaacttgcaaattatataggcgtttctaaagcttctgtatctaaatgggaaactggacaaagctatcctgacataacctttttaccgcaactcgcgacatatttcaacattaccgttgatgagttaatatgttatgaacctcaaatgatgaaggaagatattaataaactgtataataaactgtgcaaagactttacggttaaaccgtttgatgaagtcatggatgaaataagagaaatcataaaaaaatattattcatgttttcctttgatttttcggatgggtcttttaatagttaatcactatgatattgtagatgaaaaaaagcgtgaactattaattagtgaagcattagaaatatttattcgtatacaggaaacttgtaatgacatagatatttgccgtcaagcaaaaagtatggaggcaacttgttatatattgttaaatcaacccatacaagtgattgatttattgcaaaacagcaattttcccatgataaatgaatctatacttcttgcacaggggcaaatgatgaatggtcaaatggatgaagcaagagaaacatttcaacttggtgcatatcagaaccttatatcattagtccaaaatctagtgggtattttgcaaaatgcagataaattacaaatgaaggaaatagaaagacgtattctagcaatttcagatatatttgagcttgatacattatctcctgctattatgctttcttcatatttaacacagacacaaattaatttaatacatggggataatgaaggagctattaaatcattacgaaaatatgtagatttagcaacacgtgatatatacccaattataatacatggggatgacttttttaataaacttgacagatggatttctgaaattggaacaggtattacacgtgatgatacaatcgtaaaagcaggtattgttgctgctattaaaaataatccaatgttttctttattaagtgaaaacaaagaatacaaatttcttatagaaaaattatctttattggaggaataagattatggaaaatttgatggaatatttaccacttttgattcctgttattattttagatttaatacttataattactgcacttgttcatgtattgagacatccaaattataaaattggaaataaggcaatatggattattgtagtactgtttattagtctaataggaccaatcttgtattttacaataggaagaggtgaagaatgatgaatattgtctcaataaatggattatcaaaaggttttggtaatcgaaagataatagataatctaaattttactgtaccagaagggtcagtctttgggtttgtaggtaagaatggtgcaggtaagactacaacaatgaaaatggtacttgggttacttgaaccagatagtggaactatagatgtttgtggtgagaaagtgacatatggaagaacaagttctaatcgtcatgtaggttatctgcctgacgttccagagttttacaactatatgagaccacttgaatatctttctctttgtggtgaaattacggggctttcaaaaaaagaaataaagataaggagtgaagagttgttatcacttgtggggcttggcaatgaaaagagacgaataggtgggttttctcgtggaatgaagcaacgacttggtatagctcaagctttgctttcacgtcccaaattacttatttgtgatgaaccaacaagtgcacttgaccctgttggtcgaaaagaaatattagatattatgcttaaaatcaaagactcaacaactgtaatattttcaacacatatactatcagatgttgaaagaatctgtgaccatgttgctatactaaacaaaggaagcattgctcttagcggtacactttcagaaataaaaagtatgcacggaaaggatagacttttactggagtttgcaagtaataatgaaattcaaaagtttaagtctagtggtggcattaaatccttactaaaagattcagaagaaactaatatggaaattgttttgcatggtaaagatataaaagcaatacaaaaaacagttatatctacactcgcagaaatgaatctttgtccagtaaagatggaactaatagaattgtcacttgaaaatttgtttttggaggtagtaaagtgagagaatacatagcatttacaaaaaaagagtttaaggagaacataagaaattataaattacttagtttgactattttatttttagtatttggaataatgagtcctctttctgcaaaatttatgccagacttgattgctcattttgctccaactttaaaagttactactgcaccaactgctttagattcttggacacagttttctggaaatatttctggtcttggaacgagtttaactctaattgttttttgcaatattttatcaaacgaatattctaaaggaacactcgttattatgttgactaaagggttatcacgttcatctgtagtattgtctaaattttctattgcagtaattattatgacaattggtttttggttgagctttttatgtacttatggatatacaatgtatttttggccaactgcaaatcttaatcatattatattttcagcatttaacttatggttaattagtattatgtatatttccatattaattcttgggtgtgtactatttagaccagcatttgcaagtgtgttacttgtattagcagcaactgctattttgagtttgatttctattcctaaacagattgcaccttatacgcctaatttcatattatcaaaaaatatagatttagtttcaggtaaagtgacacctccagaatttattattccaatcattgtaacaattgttatttcgatagtatgtctgttattagctgttgttttgtttaataaaaaagcagtttaaggatatttttattataaatacaaatagtgctgtattgtgggaaaatgtgtttagtattgtagaagaatatatttaagtaaaaaagaggctgtctcaagatagagaaataagcctcttttttattttagtcctcctcactatactttataataattaagttattaccttaaggaactatctaaaaaaagagatatagattataatctaatgcttatcagttatttgaggtgtttagtatatagagtctaaagtagtgaaggactaaaataatattgttttcattaaataaagataagaatctttaattgtggtaaaatatactaaaaaatcattttaaaagtgataaaattattttaagtaaatattttaaaggggtgtagatatggaaaagtcaaaagtatatttttgtgatttatactcaaattcgcaaaataaaaacgtaccaaacaatgtaagaagattatttgatgaagcaggattcaaagatttaatagaaaagaatgaccaagtcgcaattaaacttcactttggagaaaagggaaatactacatatatgagtcctgtggcagttagacaagtggttgataaggttaaagactgcgaaggaaagccatttttaacagatacaaatacactgtatacagggagtagaacaaattctgtagaccatcttacaactgctatagaaaatggatttgcttatgcagttgtaaatgcaccagtaataattgcagatggattatatagtagaaattatgagaatgtaaaaatagacaaaaaacattttgaaagtgtaaaaataggtggagaaatttataattcttctgcaatgatagtaatgagtcattttaaaggtcatgaagcagcaggttttggaggagcattaaaaaacttagctatgggatgtgcaagtgcagcaggaaaacaaatgcaacattctgatgttactccagtagtaaaggaaaagaagtgtgtaggttgtggaaagtgtgttaattcttgtcctacaaaagctataagtatagtggataaaaaagcagttatagattctgatgtatgttatggatgtggagaatgtccaactgtctgtccaactagagcagtaactatacaatgggaaagtgactcagatgtgtttgtcgaaaagatggcagaatacgcttatggagcagtatcaaataaaaaagacaaggtagggtatataacttttgttatgaatgtaactccactttgtgattgtgtaccttggtcaggtagaccaattgcccatgatataggaatattagcatcaacagaccctgtagctattgaacaagcatgctatgatttgatttgtaaggaaatgggtcatgatgttttcaaacatgaacatcctcatgtaaatggaactagaataatagactatgcatgtgaaatgggtatgggaagtaaagaatatgaattaataaaattataagaatagtagcacttaaatgcatataattattgtaagagaaatctaaaagtatcaaaggagtatgcatttatgaaaatttactatgagaaggaaaacagcaagaaggctaatgtaaacaatattccaagtgtatttgcgtttaattttctaagaaactttttgactagcaaagagtatgaggaaactagaaaagaatattttataaataatctaacaaaaagtcaggttaatcaagccatgaaggatttaaaatggctatttagagaatatgaaggcttagaggttattacaatggaaagcttggatggagttaagacaaggatagttttataaaccagtaagaattatattctaataaaaaatactgctttaataataatatgtataatctatatactaatattattttgaagcagtatttttttgtgtatagtaaacttgtgtctaaaataaagttgaccaataaatgttatatatgcaatactatatataataagtaaactacataaaaatattaagttgacaaataggaggatatatggaaaaatacataataaaattaaaaaataaagtattgagagaaaaagaaataagttatgaagaagctcttaatttaataagccttgatacaaataataaaaacgattttgatattctattaaaatctgcaaatgaaataagagaatattttatgggaagaaaagcagatttatgtacgataatgaatgctaaatctggcaaatgtagtgaagactgtaaattttgtgctcaatcatctcattataaaactggtgtagaagaatattcattattagattacaatgaaatcttaaatagagctaaagagatggagagtaaaggagtgcatagattctcattggttacaagtggtaaaggtatgtcaggaaaggagtttaataatattttaaatatctatgaaggattgagggaaaatactaatttaaaattatgtgcatctttaggtattatagattatgagcaagctaaaatgttgaagtcagcaggtgtgactacatatcaccacaatgttgagacgtgtagagataattttcataatatatgtacaacacacacatataaagataggataaaaactataaaagatgctaaaaaagctgggctagatgtatgtgtaggcggtataattggaatgaatgagagtgaagaacagagactaaaaatggtttttgaaatacgagaattaaatgtaaaatcatttccaataaacattttaaatcctattaagaatacgccaatggaaaattatgatgtattagaaccaatggaaatactaaaaacaacagcagtatttaggtttataattcctaatgtgtacataaggtatgctggtggaaggctatcattaaagggatatgacaaagttggatttaatgggggagtaaattctgcaattgttggtgattatttgacaactgttggaagtgggattgaaaatgataaaaaaatgattatagagcaaggatttgaactttaataaatactacttaaattaattaatatacttttagataattataaaagtatattaattttttttgcagattaatttaaatattaaaattgaattataagttgcaatattttgaaaaaagggaaaaatatcaaaatttatataaaatggttgcaaatgggaaaaggatgtgatagtatctaggtaaccggttaagtaaaacggtttcctaaattttgggggtgaacttcttgagtataactataaaagaaattggcgaattggctggtgtttctaaaacaactgtgtcaaaagtcattaataataaagatgaaaatataagtcaggcaacaagagaaaaaattttgaaaataatgaaggaaaaaaattatgtaccaaataaattagcacaaagtttagtaactaaaaaaactaatactatagggcttcttataccagatatacgaaatccattctttacagatgtatcaagaggtgtagaagacaaagctaatgaagaaggctacaatataattttatgtaatacagatgaagatgctaaaaaagaatatgaaggaataagaacactatcagagaggatgatagatggaattatatttgcagcatcttcaaatacaaactggaaagaagcaaattataaagatataaaaataccaactgtcttgattgataagaagataagtatgaacaaagaaaccttaaaaggaattgttaaaataaataactttgaaggggcctatatagctacaaaacatttattagatattggaaataagaaaataatatacctaagtggtccacttcaaaatgaaatagcagtagatagattagaaggatataaaaaggctctaatcgagtgtaatttaagctacaattctgcttatgtatttgaaggaaaatataagattgaatggggacaagaatttataaaaaatttagaaaagatagattttgatgcaatattttgtgcaaatgatttgattgcaataggtgtcataagaggtcttaaagaaagagggttaagtataccaaatgatgtaagtgtcgtgggatttgatgatattcaaacatcaagtctaataagcccttctcttaccacagtaaaacagccgtcttatgatataggatataaagccagtgaaatattgataaattgtttaagaggagataaaaaagaatcatttgatgaattgattttcaaaccagaattagtcataagagattcaacaaaagaaagtgaataacagcacgagagacataaatagatatgtaaaggagtaatgtaatgggaaacatagttgtcataggaagtgtaaacatggacatggtatgttctgtagataaaagaccagaaaaaggagaaacagtattaggtaatagtttttttacatcacctggagggaaaggggctaatcaagctatctcagcttctaaactaggagcaaatgtaaaaatgatatcatgcataggggaagatggcttaggagaggagttaataagaaattttagaacgaataaagttgattatagtttagtatccagaaataatcacaaaagttctggtgttgctgttataacattatgtgaaaatgataatagtattgttgttgtaccagggacgaatgagctagtagatatagaattaattaaaaagaatgaagaagagataaagaatgcagatatagtattgctacaattagagattccattaaaaacaataaattatgtagtgaatttctgttttgaaaataggattaaggttttattaaatccagcaccagcagtaaaactaaatgaagatataatagaaaaagtaacttacttaacaccaaatgaacatgaatataagatagtttttgacacaaatgaagggatagaagaagtattaaaaaaatatccaaataaacttgtaataacagaaggaaaaaatggagctagattttatgatggtgaggaaatcaagcatgtatcttgtataagtgttgatgttcaagataccacaggagcaggagatacatttaatggagcattggcagtggctataacagaagggaaaaaattatatacagcagtagaatatgcagtagtagtatcaggtctttctgtaactaaactaggtgcacaatctggtatgccttataaagaagatgttgaaaaatatttaaataataaataaaaatctaatttgttcaaatttaaaactattaaaaatggaggttaattatgagagtgagaaaaattttatctttaggaattgctggaatactagcaataggaatgttaacagggtgttcaatggaaggaccaagtaaatcagataataaaggtggttcagacaagaaagatttaactattggagtatctacaataactcttcaacatcaattttttatagatattgatgagggaataaaagaaaaagctaaggaattaggtgtgaaagttatagtaaatgacccagaccaagatgtagctaagcaaacatcagcaatagaagattttatacaacaaaatgtagatggaatgatagtacttggaactgataattcggctatagtaccagcagtagaaggagcatttgaaaaaatgccagtagttacagtagatgctgtattaaatactgaaaatattacaagttatgtaggaacagttagttatgatgctggtaaaaaattaggggaatacactaaaaaatacatagatgaaaagttaggtggaaagtcagaaatagcaatagtgacagatttaaaatctcaaatacaaatgcagagaatagatggatttaaagatgcgttaaaaggttcagcaaatgttaagatattaaattcacaaccaggatatgacagagaagaatctcttaatacagtagaaaacttaattcaatctaatccagatgtagatataatatatgcaacagctgaaaatagtgtactaggagctaaagctgcacttgaatctgcaaaaaataaggatgttaagattgtaggatttgacttaactgaagaagcatcaagtggaataacagatggaactattcttgctatgattcaacaacaacctaaagagatgggacgtttagctgtagaagcagtagtaaaagctataaaaggggaaaaggtagaaaagaatataccagtaccagctttactttatgataaggaaaatataaaagactttaagaattagtaaaataaaatgagattatttgaaagaaatcctatttaaaaaggagtgtcattatgagtaatataattctgaagttaagtaatattgctaaagaatttcctggtgtcagagcattagataatgttaattttgagttatttcatggcgaagttcatgcactactgggtgaaaatggtgctggtaaatcaacaatgataaagattttaactggtgcacattcgaaaacttctggaaaatttatttttgaaggcaaagaaatagagaatatatccccagatatctctaaaaagataggtataaatgccatatatcaagaactaacagtttttgacgaattaacagtagcacaaaatatttttatgggaaaagaaataaatggcaaagtcttaaccaatgacaaaaaaatgaatgaagaggctaaaaagattttcgataatatgggaatagatataaatccaaatagtttagtcaaagagcttagtatagctcaaaaacaaatggtagaaatagcaagagttttatcatcagaaactaaagtattaataatggatgaacctacttcttcaataagtaaaaaagagactgaaatactttttagacttataaatgatttaaaagagagtggagttagtataatatatatatcccataggatggaagaactctttgagatttgtgacagaataactataatgcgagatgggaaaacgatttcgactttgaataccaaagatgtatcgtctgaggaagaattagttaatttaatgatagatagaaagctagaccaatttttcccaaaaagaaaagtagaaataaaagaagaaattatgcgagtggaaaatctaactaagaacaatgtttttaatgatattagctttaatataagaaaaggtgaaatattgggaataggtggactagttggaagtaagagaagtgaaatagtagaagctatatttggacttagaacatatgattctgggaaaatatatttaaacaatgaagaagtaaagtttaaaactccatcagatgcaatagaaaatggactgggattaataacagaagatagaaaaggtactggattgtttttacaaatgagtgtcaaagaaaacacaactatggctgggttaaaaaagatatctaagtttaaatcaattatagatagaaaaaaggaaaaagagattttagaaaaatacatagaagctttaaagataaaaacaccacatatgaatcaagttatacaaagtttaagtggtggaaaccaacaaaaagctataatagcaagatggcttttattacaaccagatatattgattatggatgaaccaaccagaggtatagatgtaaatgctaaggcagagatatacaatctaatgggagatttagtggagagtggtgtaagtataataatgatatcttctgaaataccagaattaatatcaatgagtgacagaataatggttatgagagaaggtcatataagtggatttttagaaggtgaagaaatggttgaaaataatgtattaaaattggctttcggaggtaaaattaatgagttcaataactaagcataaagaagaaaaatcttctccattattgacaaaattaacaagtgtatttagagaccaagggagtgcagctgtaggacttgtaataatttttataataatgagtgtagcttcatctaactttttaactttagataatttaattaatgttggaagacaaatatcaataaatgcaatacttgcagtaggtatgacatttgtaataattacaggaggaatagatttaagtgtaggagcagtaattgctttagtaggtacattttgggctacaacagtagtgaattataatgcacctatatgggtaggtatgatacttgcattagcaatagggacaatattaggagtcataaaaggtgcaattatttcaacacaaaaactacctccattcattgtaactttagccatgttaacgataataagtggggcaagctttgtatttacaggaggaagacctatatcagtaaatacagatgcatttaagatgctcggtagaggatatattggaccaataccaataccagttataattatgattatagttgtaatagcaggacattttctattaaaaagaactaattttggacgtcatgtacatgcagtaggtggaaatgaagaggccgctagattatgtggagtaaaagtaaataaagttatagtaaaagtatacgcactagctggactactaacagcattagctgggataatactatcatcacgtttggcatcaggttcaccaactgttggagatggagcagaattggatgctatagcagccgttgtgcttggtggtactaatatgatgggtggttctggttctatagtaggtacatgtataggtgtcggaataataggaatattaggaaatggattaaacttattaagtgtatcttcatataatcaaatgattataaaaggtttggtaatgttatttgctatatggataaataatataaaattaaaaaaatcagctaaatctaaatagtaattaaattttagcttataaactataaaaattattaagtttttgtatatatttttatactttaatttgcatacatctttatacattgaatgggaatatgctaagtgaaaaagtttactatggcttaaatagatgagattagacttgaaattttaaatgtaaaaataaatcttaggaggaaatatgaaaaaaattctcttagatacattaaatagtaaaaaacaagaatacatagattatttaaaagaacttgtaagtataaagactgaagatgttggtcatggaatactaggtggatttgaaaaagaaggacaggaatatattgaaaaacttgcaaattacataggttttagtgtagatagacaagaaatgagcgaagaattaattaaaaaagcaaaaaatatatataaagaaggaaatctaggtcacaattatcaagatagatataatttaatttgtaagtatagtgatgatttacctggtaagacaattgtatttaatggtcatgtagacactatgccaccaggtgatataagtaagtggaaatataatccatatcgtgctacagaagataatggaaaactttatggtcttggaactgctgatatgaaatctggacttatagcatcaatattagctgtaaagcttataaaagatagtggtctaaatgtacctggtaatgtaaaaataatgtcagtagtagatgaagaaggtggcggaaatggtaccataaatgcagttatgaatggtattggtggagattgttgcataatttgtgaaccatcagaacaaaacttaatagttgcacatatgggatttgtattctttgaagttgaggttaaaggtgtgtctcttcactgtggtagtaagtgggagggtgtaaatgcaattgagaaggctatgttgttgcttcaagatataaaagagttggaacataactggcttatgatatataagcatccactattaccttcacctacaataaatttaggtgtaataaatggtggaacagcaggttctactgtgccagataagtgtgtatttaatttatgtgtacacttcttgccaaatataatgagttatgaacaagttgtaaatgatgtaacaaatgtcataatgacaagggctaatggagatttatggcttaaagataataaaccaaatataaacatatatcaatcagggttaggttttcagatggacaaggattctgattttgtagtgaatgcacataaaatactagaagaaactttaggaaaaaaattagagataaaaggttcaacagctggcaatgatgcgagattaatgaaaaatttagctgaaataccaacacttatattagggccaggttcaatagaacaatgtcattcaattgatgaatatgttgaaattaaggagtatttagatagtatacttatgtatgcaagtctaatattaaacttataaaagtaggaggaatatataaatgaaaaaagtattaatagtaggggaatcttgggtaaaaaatataactcatataaaaggatttgatacgtttgttacaactcattatgaagaagctgtaaagtggttgaaagaagcaatagaatctggaggatatgagacagttcatatgcctgcacatgtagcagcagatagttttccgtataaattagaagagttaaatgagtatgactgtataatattatctgatataggttctaatacgttcttattatctaatagtacttttatagattgcaatagtaatccagatagacttgaactaatcaaagagtatgtaaataatggtggggcgttaatcatggtaggtggatatatgtcatttacaggaatagatgcaaaagctagatttggagaaactgctatcaaagatgtattaccaataacaatgatagataaagatgatagagttgaaaaaccagcaggaataattccagaagttattgactctgaacatccagtattaaaaggtataccaacagaatggccaaagtttttaggatataacaaaacagtagctagagataattgtcctgttttagcaactattggaggagacccatttgtagctgttggcgagtttggaaaaggaaaatctgctatctttagttctgactgtgcacctcactggggtccaaaagaatttactgattggaaatactataataaattatgggttaatatgcttgattggttaacatgctaaaaattttataaaacttgaaaacctcttacttgataaaatgaaacttacaagtcaagaggttttattgtataaaatggttgtatggtagaaaatatttttaaatcagttaaaattagtcattttggctgataatcgataagttattagaaacagggaggtttatataattaatatggataatttaaataaaaagtttttgatggaatatatagatgagatacagggagaattaagagatatatcagataagatatggaaaaatccagaacttcagtataaagaatactatgcttcaaatttacaaaaagaatgtttaaaaaaacatggttttagtatagagggattagaaggtatggatacagcatttgtggctagttatggagaaggtagaccagttatagcagttttgggagaatatgatgctttagatggtttgtctcaaaaagtatccactactaaagaacctattgtagatggtggtgcaggtcatggatgtggacataacttacttggtacaggttcaataggagctgtaattgcagtaaaggaattaatcaaactaaaaaagctgaaagggactataaaatactatggatgtccagcagaagaagatttatctggaaaagtattgatgataaaaaaaggtttttttgatggaattgattgtgcttttagttggcatccatttgatataaatactccgataagaatcccaacacttgctaattactctgtgaaatttagatataatgggattagtgctcatgcagcacaagctccttataacggaagaagtgcacttgatgcagtagaacttatgaatataggttgtaattatttgagagaacatatatttgataattgtagagtacactatgtaactactaatggtggaaaaatgccaaatatagttcctgattttgcagaagtgtggtattacataagaggagttaaaatggagcatgtaagagatgtatttggtaggattgttgatatagcaaaaggagcagcattaatgactggtactattatggaatatgacattataagtggagtatatgactatattccaaatacaatattaacagatattctatcacaaaatatgaaattagtaggtgtgcaaaactataatgaagatgactactattttgcagataaattagctgagacagtgtctatagataaaagaagtagtgtttctagtgtattaagtggaaataaggatattactaagatgaatttacatgatgaggttacagatgatacatttactcataataactgtatatcattatcattggatattggagatgttagctacataattcctacagcacaatgttcttgttcagtttggcctattggtatttctgcccatacatggcaatcttgtgccagtgcaggttctgatatgggatttaaggcaatgttattggcatctaaatctatatcatgttcaataaatgatgtaatgcttgatgaattggttataaataaagcaaaaaaagaattgaaggatactgtaggtagttttgaatatactccaattatttgaagagtaatttaatacaagtaagattgaattgtatgaattaggatgaatatataaattaatattatttttaacttaactttctaattattttcaatctaagatacaataattagaatatatttttaaagtttcctatttaaggaaaataatttgattttatgtttgataaaaggacttataatttgtaagcccttttattatatttattttttgtttataattaattttattttttaggtttagttaggttatagattaccctgaaaaataacatttaacttattattaaaaacatgtaagaatagtttataaatattttattttcgatgttgtttattatatccattttatcgatggatgaggaatggctctgccttccctagttacagatgtagtagggaaaccaattgcacaggcatcaaatccatattcacctgttggtactcctaaaatatcacaaaaatctttattatcgctcaatcttcctattacactaacaagttcaaaacctaatcctaaagcagttgatttaagccacatattctgcatcacatgagataatgacttttgttctataggtggtattccacgacgttctgccacaataataagataaggtgctgttcctataccaagaacccctttttcaacttgcatttttaaggaagtaatgaaggattgaagggtaatgttgttctttgccttcttctcattgactgatatttgagttttaataacatcaacaagaatggtttttattttattcatttgtaaactgttatttgaaataacaaagaaatgtctgaaatctgtttgttttgctactgaaagtattgcataaggtgcaagtcttccagtttcaattatttcttcaatcagcccttttgaaggtacttcttttgtaaaacttcttatggatcttctagttcttaatagcatatccaaaacttcattaacattgtttttatctaaattgttcatttttatcctccactaatagtattcttaagatgttctataatgcatccatataaaggcgaacttttcggtcatattaaacatttccttcaaattaagtcgctatttctatgaacacaatgttgattaataatctatatgtatattataatatttatattgcattatgcaataaacaataatatttaaactgttaagtaataaacatttactataaaattgttaattaaaattaaaaaaatttatatggaatgaggaaataattcatgaaaaaagtatctattgatagaagaactatacgtactaaaaaaatgattaggtctgcattagcagagttaatagatgagaaaggatttaacaatatatcagttactgatttaactcaaagggcagatataaatagaggaaccttctatctgcattatgttgataagtatgacttgttagagaggattgaaaatgaaataatacaggaaattgaagaggagaccaaacatcttgattcatccaacatgatggagatagatacctcaagtgaacctcttccatttatggtaaagctttttgaatattttagaaaaaattcagtaattattaaatctatcttgggtcccaaaggtgaccctacttttgaaagaaaaataaaaaaatttattgaaaccaatttgtttgagaaacaaaaactaataaattttaacatagatgaggcaataatttcagaagaatattttatacaatatatactttcagcagacttaggtgtaattcaatattggcttgaaaaaaatatgaaagagtcccctgaagaaatggcactgatacttgctagaatgtcgttactcggtccgttaagagcagtgggaattcgtaaagattcataaaaatagttttatatatattagactttgaaaatatatgtttaaaaaccattttttactactactgtttataaattaggggagatatcttaaaatattagtaaaaggagtgctaagtgagtgtaataactatgagataagaggtttagttgatatagtcaaaacttcaaaagaatcaattagaaaagttaaaatattgcaattaaatttaaaggagtaatatatgaaaaatgaaaatataagttatttggcgttaggattatgttttggtgttgttttgggttcattatttaaaaacttagctattggtttatcctttggattagttattggagtagtattagacagtaagaaaaataaataaaacttcaatagtaacatataacaattatactatttttgtataaaatcattggaaatcaacaatagaaaatatttgttatttaaaaactaaaaatacagtttaaacgacctaaaaatatattatataattattataacaagataagtgagagtaaggttatgataatagagtaatatttttcaattattactctatttatatttatttagttatactatagtttatattgttattttattttcatatgcagtatagggaatggattaccttgttcatcgaactcagattttttaaagactttaaatcccatatgtttataaaagcctaatgcttgttgattttgctcattcacatctacataatttacatttaatacttctattgcatattctacaagtctttttccaattccatttcctatactataattacttacaaataacatttcaattttaaaatcatgtattcccataaaagcttttataatacctttttttgtctcttacacataaaaaattactaacatatttagcacattctttaacttgaggctttattgatattatattttcttcacttaaaaagtcatgtgttgctcttactgatgattcccgtgtatctagtatttctttcatatctttattgttaataatatttaaattttcaatttttatcatttaataattcctcttaagtaagtatgttacttaatattatatgttaaatatgatttaaaaaggttataagaatatttttgtattaaatataatcaaataaatatatttatttgtcataaattaaatgtccactaaaatagaaaaaataagaagaaataggtaataaatgatagcttatagcaaaataaagatgtaagtataacaatagatgagattggaattaagtcactatacctaacagaacattcttaggcgaatatagaagacttaaaaaagaaaagagaagtagacaagaatttattaatgattacatataaaataaatgaattataattttattaatgatataataataattaacaaaaaataaaagaggaacgagttaatgtttgatggcatacactcattttctaaccaataaaacaatagattcaattaaggttactaaagtctaatcaacacataaacatataggataaatacatctttttaatatattaattatgttagacttacaaaaaatgtaaatacatagcttgttaaatcttgattgaaccttaagtaataagggataaaaaatgacttgttcaaaggcaaagaatatactattaaatgatataagtaacttagagataatatgtagtaagtcaaaagaactatatagcatcagtaagtaaaaagcgtaaaaacttacataatgcactataaaataaatgagttagaaaataaatataatttatataataaagtagtacaaaaaggagtatttatgtttggatatgttaaaataaacaaaatggatttaacatttagagaatatgattattacaaagcttactattgtggactatgtaaatacttaaaaagaaatcatggagaaatctctaggttttctttgaattatgatataacatttttaattgttttattaacagcagtatataacccagagtctataagtacagaggaagtgtgtatagtaaatccatttaaaaagaaaaaggtaattacaaatgatattacagaatatgcagcaagtatgaatattcttttaacgtattataaattggaagataatttaatggatgataaacgcataaaagataaattggcatattatatatataaaaacaaattaaaattagcatatgaaaagtatcctgaaaaagcagagtatataaaacaacaactaaatgaattaaataagttagaaaaagataaaaatataaatatagatgaagtatctagtatatttggaaatataatgggtgaagtatttgtctataaaaaagatgaaaatgagagaaacttaagaatgataggttttaatataggtaagtatatatatctactagatgcctatgaagatttagatgaagattttaagaaaggaagatataatccatttatagagtatattgataaaaatgatgagttaaaagaaaaagtaaaaaaaataatagtaacatcattaggatttttagctaggggaattgataatctaaatctaaataaaaatgttggaataatagaaaatataatttattctggtgtttatttaagatatattaatatattagaaagtagaggtggaaagaatgtacagtaatacttataataatgaaaattttatgagagcaagagcattcatagaaaatagtgaatttaaaaaagcatatgattttttaaaaactttgactgacaaatgtgcagagtggtattatttaactggcttttctgcaatgaacataggatattatgaagaaggtgaagacttcttaaaaagagcaaaatttatggagcctgaaaatagtgaatatagtgatgcacttagaagttatacacaatatagaaatgattatagcaatagggctgacaattataatagaagaagacgtaatgatttagatggatgttgttgctgttgctgtgatgattgctgttgttgtctaggtgacgattgttgtgaaaattgtgctaagctttggtgtttagattcatgttgtgaatgttttggtggagatttaataacttgttgttaggatgataaatatgagtataaaagttgcttatggaggagttttattagcattaaatgtgatattgttgactcttacaaatattattcctgtaaatacattgtttattatggggttagcatcacttttagtatcaattgtaataatggaatggggctttaagagtggaatcgctttttatataggttctatagttttaggatttatagtgatggcaagtaagtctcaatggattgtatattcacttacctttggaatatatggtattgtaaaatatcttatagaaaaagataggtctatatatattgagtattttatgaaattagtatttgcaaatataatgatacttatattgtattttttattaagaacaatagtttatattccaataaacatatttattataggttcatttgagatagcctttatagtatatgactatgtttacagttcttttataggttattacaataataggttaagaaagatgctatttaaaaaataatagttgatttttatatttaattttaatgaaattgtagtttggataagtgtaaatgatatatctgaatatacattaaagcataaagctaaatttaatatattcttagtgcaacatataaaagctttgatttttagtcaaagcttttatatgttagatataaatattagatataatataagtttttaaaatagatagtataaattaaatatccactatatttacatctgtagatagagaataaataatatcttttctttctactattatctcaacatttttagaaatttcctcatcaagtgatatttgagataaaagttcctttgttggatttattgctattggatttccaactctttttagcatatttatatcaccattagtatctccataggcatacgagtttgataaatctaaatcatactttacaacaaaatcatttatagcattattcttacttatagaatcccacattggaataactgtgcctgtaaatatattattttcaaagacataatcacttcctagaaaatcggttacattatatttttttgccattttttcaacaagaaatccagggctaccagatataaatataactatgtgtccttgatttagatgccactcaatccttgaacgtgtgtatttataaactctatctgcttttaatttaattacttggtcacttgtaaagttgatacaggttttatctaatccttttagtgaatcaacataaaggtcacatatttctaatagataatcatcataattaccttgtcttttatcccaatccataaaagtgtctctagcatgtttataccaatttttttggtcaattatatcgtatttaattaattttttaaaatgttcaaccataagagagtctctataaagagtaccatctatatcaaaaaaagctgctatatttttcataagaccacctcaattaatcatttccttatattatattataaattgtatctaagttgttaaaatatatgtataataatttatatattaaaaaacaagtattttagagtttaaaggatgtgactatatgaattttaattttgcaaaggctacaaattctagacttatgggcagtttaggtcttataataaattggatagatgatgaaaacaatcacttttgtcaatattttttattagatgcagagggattaggattagcagattatgtgagtttaaataacccaacacaagaagaagcttatatggaagaagaaagattgatgggaggatttggttcagatagagttgaattaacgaaggatgaatctttatttttagtatcttattttggtaataagaatctttattatgataagctattgccaggagataaatgtgagtatattgatattataaaaaactataaaacagatttaattatagaaaaattatacaataaaatatgtaaaagagttgatgaggaagttgaatttataaactatatgactatgagatttatagcatgggatagagaaagtttaaaatatttttctggaagtgacgagattgcaaatatgcatattactaatataaatggaacattacttaaaaacgtggtaagtgataaaggtcaaggcagatatataagtgaagctttatatgaagacaatgatggatattatatatgtaaaattgctttttgcataagtaagtgctatgaaactggttttagaattaattctctattagtgacagataaagaacttatgtatgattttgaggtatttgatgagatttctaaaagtgaatttgtaagtgtttacagtgtaaattcacctgaagaatttgcaggagtattttatagagaaaatccatttctgttaaaaagtaatatgaatgaaggtatattttttactagatttaattttaataatgaccatgtaaaagaaaatgtatatataataaacaatgatatgaaagctatatattacttaatgggaaataagttttttattggtacttataacgaaaatgattgcaattatatcaatgaaataagtcagtctaattatagtgactatattaaatttgaagagaaatttttctttgagcaaaatgcattatatgactttgcagaatcaggttcattagattttgatgattttttggaataataaatttagacattatttaagcgagattaactgaatttaatctcgcttaaatttatttctataatattgggggaatattatgaggaatacatttattattgtggtcaattattaaaattttatacagtttattataaaaaatttatacttttctttatgttgtttgccaatattagtctcaaatacgagtaccatactattctgacccaccaacacaagaaagagttttttaaatgaaaaagtcagataaaattaaattttatctgactttttctatgtttatcttattagattatgttaatatctgttgaccgaataagcgcatactcagtcaactttctatacctataataatattgggggaatattatgaggaatacatttattattatggtcaattattaatgttttatacaacttgctcaaaaaaatatatattacatttcttcctcatcaaattcttcaatattagtagcctgtggtataccttgtatagacatattactagaaccataaggagtaggatatatattaggaggcatagtactaggcataactacaggcataccttgcattgtattatgacatataactcctggtatcatcataagtacattaggaggcatattttgattacatgagaagttaggaatacccatagtattattcatattataccccatattactgttcatgttattaggcacattgttaggcatacccatgttactattcatattattaggcatattgttaggcatacccatgttactattcatattattaggcatattgttaggcatacccatgttactattcatgttattaggcatattgttaggcatacccatattactattcatattgttagacatattgttaggcatacccatgttactattcatgttattaggcatattgttaggcatacccatattactattcatattgttagacatattattaggcatacccgtattattattcatgttattaggcatattatttgtagcagatgtattgtaattcatatttccggatgtattatttgtgttaggcaagttgtttggagaattactacttttaggataatgatttacattattaggatataggttatttatgttctggttattaggtatttttgtataaccattagaaatttgagggtcatttctcaattcatcttggggaatttcttcattagtaatataatctgcatagttcgctgggtctaagtaaggcatgtaactagtatctaaatccttttttttcttgttactcatattaaacttgcacctcctagaaaactataaaaaagtttacaaaaacttattctaataatatatatattaaaaaagtttataatatgtgcattctaattatattaaattaataaaaattattgttgcaaatttaggaatgatagcatataatgaacatatgaacagttattcatatattaaaacaatggaggattaaagatgagagaagagataaatgattgtaattgtaatatagtacatgaagaaatagtaacagaggctaaatcaactatgccagatgaagagatgttatatgatttagcagaattatttaaagtatttggggatactactagagtaaagatattatatgcattatttgcaaatgaaatgtgtgtatgtgatatagcgagtttattaaatatgactcactctgcaatatctcatcaacttagagtactaaagcaggctagattagtaaagtttagaagagaaggaaaaacagtgtattactcattagatgatagtcatataagccagatatttgattgtggattaaatcatattagagaaacttataaatgataaatgagaggagtgaatatatatggaagcaaataatttaattaaaaaagaatttatactaggaggattaaactgtgcacattgtgcagaggagattaataataaagtttctaaactacaagaagttaaatcttccaacttaaattttataaataaaaaacttatagtaaatataaaggaaagctttaatgaggatactactatagaaaagataatagatataatagattcaacagaaccaggtcttgatatacaaataagttctaaagaaaatgcatctagtaaaacatcaattaaaaaagagcttatattaggaggattaaactgtgcacattgtgcagaggagattaataacaaggtttctaaattaaaagaagttgaatcttctaatttaaactttgtaaataaaaaacttacagtaaatataagtaataactttaaagaggatgatgttataaataaaataaaagaaataataaattcaacagagccaggacttgatatacaagtagggtctactgacaaagtaaaagggagaactactgaaaaatcaggagctgtaaatgatacaaataagaaagaattagttccacttataattggagcacttgtatatatatttggtatatatcaaacagctacaggttatgaaagtcagtttagcaatatagtatttatagttgcctatgtaatagtaggtggcgatgtgcttttaagagcaataagaaatatatcaaaaggaagagtatttgatgagaactttttgatggctctagcaacagtaggagcattaacaataggggagtcatcagaagcagtaggggttatgcttttctataaagtaggagagtatttacaaggtgttgcagttggtaaatccagaaagtctataacttcacttatgcaaataagaccagattatgcaaatctaaaatttaattctgaagttaaggtagtgtcaccagaagaagtaaatgtaggggatataatagtagtaaaacctggtgaaaaagtaccattagatggtgtagtagtggatggagtttctatgctagatacttctgcactcacaggagagtcagtgctgagagaagttgaaaaaggagatgaaatcttatcaggtgttataaataaaaatgctttattgagtattgaagttacaaagagttttggagaatcaacagtttctaagattcttgaccttgttgaaaattctagcattaaaaaatcaaagacagaaaactttatatctaagttttcaagatactatactccaatagtagtaatagctgctttattaatagcatttgtgccaccacttgtaatctcaggtgaggtatttagtgattggttatatagaggattgatattcttagtcgtttcttgcccttgtgcattagttttatcaataccacttagtttctttagtggaattgggtttgcatctaaaaatggtatccttattaaaggaagtaactatttagaagctttaagaagtgtagatacagtagtatttgataaaacaggaacacttactaaaggtgtgttcaatgtaactaagttaaatcctgaaggtatatcagaagaagaattattagaatatgcagctattgcggaggtaaattcaaatcatccaatagcaaagtctatattaagttactataataaaaaaattgatttagatacaatagacagttatgaggaaatagcagcttatggaattagagtaaagcataatggcaattttatattagcaggtaatgagaaacttatgaaaaaagaaaatatatcttattcatcagctaaagaagtaggcacagtagtctatattgctgttgataaagtatatagaggttatatagttatatctgatgaagtaaaagaagatagtaaaaatgccataagaagcttaaaagcaataggggtaaaagaagttgtaatgttaactggagataatgagaaagtagcaaaaaatattgctcaagaattagaattggatacagtttactcaaatttacttcctaatgaaaaggtagatagattagaagatttatatgaaggaagaactgaaaaagagaaaatagcatttgtaggtgatggaataaatgatgctccagtattagctcgtgctgatgttggtatagctatgggaggcttaggttcagatgctgctattgaagctgcagatgtagtgcttatgacagatgagcctagcaagatatctaaagcaattgaaatagcaaacaagactaataagatagtgtggcaaaacataatatttgctctaggagtaaaaattatagttatgatactaggtgctggaggagtagctactatgtgggaagctatatttgctgatgtaggtgtggcacttatagcagtagtaaatgctatgagagctatgagataagggataaatgtaaatccatactatttaaaaaacttataattatatattgaagtatgtaataatgaaaggtatcaataagtttcttttaactttattggtacctttttattggagcgctttgcatatataaatttatattcattatccattgtgtttatttaatgtatttatttagtgtagagcttttatattgtaattttaaaatttagacatagaaggtttattaataagtctatattaagtttaaattagattcataaaaattataatacttatgattgtatatatattatattaatagttataatttttacaacaaaatgtgtgtgttaaaatactctaaaccaacagtatgactgtcattcaataaattatgtaatataagaaagtaaatatttttaaaaaataatttaaaaaagtattgacgaaatatttttaaggtgatatagtattacttgtccttaagaaaagggcaaacataaaaaatgaactttgaaaattaaacagtaggttaatttataaaacaagaaacaaaccataaagccagatattttgataacaatagtatctgagcctgataaacttttatttgagagtttgatcctggctcaggatgaacgctggcggcgtgcctaacacatgcaagttgagcgatttacttcggtaaagagcggcggacgggtgagtaacgcgtgggtaacctaccctgtacacacggataacataccgaaaggtatgctaatacgggataatatatttgagaggcatctcttgaatatcaaaggtgagccagtacaggatggacccgcgtctgattagctagttggtaaggtaacggcttaccaaggcgacgatcagtagccgacctgagagggtgatcggccacattggaactgagacacggtccaaactcctacgggaggcagcagtggggaatattgcacaatgggcgaaagcctgatgcagcaacgccgcgtgagtgatgaaggccttcgggtcgtaaaactctgtcctcaaggaagataatgacggtacttgaggaggaagccccggctaactacgtgccagcagccgcggtaatacgtagggggctagcgttatccggatttactgggcgtaaagggtgcgtaggcggtctttcaagtcaggagtgaaaggctacggctcaaccgtagtaagctcttgaaactgggagacttgagtgcaggagaggagagtggaattcctagtgtagcggtgaaatgcgtagatattaggaggaacaccagttgcgaaggcggctctctggactgtaactgacgctgaggcacgaaagcgtggggagcaaacaggattagataccctggtagtccacgctgtaaacgatgagtactaggtgtcgggggttacccccttcggtgccgcagctaacgcattaagtactccgcctgggaagtacgctcgcaagagtgaaactcaaaggaattgacggggacccgcacaagtagcggagcatgtggtttaattcgaagcaacgcgaagaaccttacctaagcttgacatcccaatgacatctccttaatcggagagttcccttcggggacattggtgacaggtggtgcatggttgtcgtcagctcgtgtcgtgagatgttgggttaagtcccgcaacgagcgcaacccttgtctttagttgccatcattaagttgggcactctagagagactgccagggataacctggaggaaggtggggatgacgtcaaatcatcatgccccttatgcttagggctacacacgtgctacaatgggtagtacagagggttgccaagccgtaaggtggagctaatcccttaaagctactctcagttcggattgtaggctgaaactcgcctacatgaagctggagttactagtaatcgcagatcagaatgctgcggtgaatgcgttcccgggtcttgtacacaccgcccgtcacaccacgggagttggagacgcccgaagccgattatctaaccttttggaagaagtcgtcgaaggtggaatcaataactggggtgaagtcgtaacaaggtagccgtatcggaaggtgcggctggatcacctcctttctaaggagaattacctactgtttaattttgagggttcgtttttacgaatactcaaaattagcacttttagcaacgggatttatccgttggcgccgtgctttagcactttgaaaactgcatatatatttagtgatatgacatctaatttgtaatatataaagctgataactttttaaaattatcgaagttgatagcttctaatctatcaaacctttttaactggtcaagttattaagggtgcagggcggatgccttggcactaggagccgatgaaggacgtgataagctgcgataagcttcggggagttgcacgtaaactttgatccgaagatttccgaatgaggaaactcacttagagtaatgtctaagtatcattaagtgaatacatagcttaatgaggggaactcagggaactgaaacatctaagtacctgaaggaagagaaagaaattcgattccgtaagtagcggcgagcgaacgcggattagcccaaaccaataaagttttctttattggggttgcggacatatcataacgaagaggtatcgtaattgaagaggtttggaaagacccaccacagaaggtaatagtcctgtatgttaaacgagaagacttcagatatgatccagagtaccacgggacacgtgaaaccctgtgggaagcaggagggaccaccctccaaggctaaatactacctagtgaccgatagcgtatagtaccgtgagggaaaggtgaaaagaaccccgggaggggagtgaaatagaacctgaaaccctgcacttacaagctgtggaagcacatttcttgtgtgaccgcgtactttttgtagaacgggccaacgagttacgttaagtagcaaggttaagcacttaaggtgcggagccgtagcgaaagcgagttttaactgagcgttcagttacttgacgtagacccgaaaccgggcgacctacccatgagcaggatgaagcgaaagtaaaatttcgtggaggtccgaacccacgagcgttgaaaagctcggggatgacttgtgggtagcggtgaaattccaatcgagcccggagatagctggttctccccgaaatagctttagggctagcctcaaggtgagagatacggaggtagagcactgaatgtcctagggggtattgcacctaccgaagactatcaaactccgaatgccgtcatcttatacttgggagtcagactgtgggtgataagattcatagtcgaaagggcaacagcccagatcgtcagctaaggtccctaaatgtaagttaagtggtaaaggatgtgggattgcacagacaaccaggatgttggcttagaagcagccactcattcaaagagtgcgtaatagctcactggtcgagtgatcctgcgccgaagatttccggggctaaaacttactaccgaagctacggcatcagtaatgatgggtaggggagcttcccatacgggttgaagcatgaccgtaaggacatgtggacagtatgggagtgagaatgttggcatgagtagcgagatgtgggtgagaatcccacaggccgtaaacccaaggtttccaggggaaggttcgtccgccctgggttagtcgggacctaagctgaggccgaaaggcgtaggtgatggacaacaggttgatattcctgtactaccgataaccgtttgagagaagggatgacacagtaggataagctaagcacactgttggttatgtgtgcccaagcattgaggcagtcaaagtaggcaaatccgctttgataatgctgggatgtgatggggagcgaaatttagtagcgaagtagctgatttcacactgtcaagaaaagtctctatcgaggttaaaggtacccgtaccgcaaaccgacacaggtgggtgaggagagtatcctaaggccagcgagagaactgttgttaaggaactcggcaaaatgaccccgtaacttagggataaggggtgccaccatcaggtggccgcagagaataggcccaagcgactgtttaccaaaaacataggtttctgctaagtcgcaagacgatgtataggagctgacgcctgcccggtgctggaaggttaaggggatctgttagagcaatcgaagcagtgaacttaagccccagtaaacggcggccgtaactataacggtcctaaggtagcgaaattccttgtcgggtaagttccgacccgcacgaaaggcgtaacgatttgggcactgtctcaacaacagactcggtgaaattgtaattccggtgaagatgccggatacctgcgacaggacggaaagaccccatggagctttactgtagcttgacattgggtcttggtactacatgtacaggataggtgggaggctttgaaaccaggacgccagttttggcggagccatccttgggataccacccttgtagtactgggactctaaccataggccatgaatctggtcttgggacactgtcaggtgggcagtttgactggggcggtcgcctcccaaaaggtaacggaggcgctcaaaggttctctcagtacggtcggaaatcgtacgtagagtgtaaaggcaaaagagagcttgattgcaagacatacaggtcgagcaaggatgaaaatcggacttagtgatccggtggttctgcgtggaagggccatcgctcaacggataaaagctaccctggggataacaggcttatctcccccaagagtccacatcgacggggaggtttggcacctcgatgtcggctcatcacatcctggggctgtagtaggtcccaagggttgggctgttcgcccattaaagtggtacgcgagctgggttcagaacgtcgtgagacagttcggtccctatccgtcgcaggcgtaggaaatttgagaagacctgtccttagtacgagaggaccgggatggacgtacctctggtgtaccagttgttctgccaagggcatggctgggtagctatgtacggaatggataagcgctgaaagcatctaagcgcgaagccaacttcaagataagatttcccaccgcaagggtaagactccagaaagactatctggttgataggtcgaaggtgtaagtgcagcaatgtatttagcttatcgatactaataggtcgaggacttgaccaatatttatttgatgttcattcattaagatatatgtgtagtttttagagtgctaactctaaagaaactagtattactaggttctataaacttattaaaaacttaatagaaatattaagcataaagattatgtggttacaatagcagagaggatacacctgttcccattccgaacacagaagttaagctctctagcgctgatggtacttggtgggaaactgcctgggagagtaggacgtagccacgtaatctttttttatttattaagtttcttattttaaggtactatttttaaagtatgttataaatgctttgtgtaaatacatataatagtttaaagagattgattctttaaatatagggtgagaatccttagaatatgtacccttaaaacctttaaataagaaaggagatagataagtaagtgtctgtaatcaatagttttattttacaatatggattaatctctgtatttgtattaattatgattgagtatgcttgttttccattacctagcgaagttgttttacctttatgtggagcaattgctgcaagaaatcattttggatttctgacaattttaattttaagtataattgcaggtatacttggttcgatattttgttatacagtgggaaattggggaggtaaatctatcataaataaaataatagagatatgtccaaaggcaaagaaaggaatatttgcatctcaagattattttaataaatactcttctatttctgtttgtgtatgtagattaatccctttatgtagaacatacatatcttttatagcaggtatagcaggtcaaaatattataacttttgtaatatcatctatcgtgggaataaccatatggaatacttcattaatcagtataggatatattttttctgagagttgggtaagaataatgtcacattataatgattataaattcctcgttctaattataccaatatccataatttttattggatttgttattaagtcatttatacataaaaaacatcacaagataagattataaaaaatattagaaaaatttcttttgtacaaggtcattaagacggttgagaaaatagaaggcgtcgtaaatctgcataagcactacgtttttgtaggttctcggcgtttcttttattgcttgtgtctgtggtacttttttcttaaaatgtaccatgttttacactttgttgaggataagtttgcttatatagaagaaaaggcggcagctttgaaaatcaaaactaccactttataaatattcaaaaatatgttgcctctgtgacagtttttttatattcgttcggaagattaaaaccaaatatttaaagttatagtattaaaatacgaaacaataacttgctaatattacattcactataattaacataagttactaatccagtccaatcttatcagtccactcatttattctttctattacccctttaggtgggtcattgttgaatttccattcagtataacagtgtaacatgccaaaaagaaacaagaatacaattagaataatcagtttttttatctttttcattttgatatacctatttcaatttttttcattgtgttttagccctttcagtataaatgcagaaaggcaggcacaaagtaataaacttatgatactccccataattttttctccagtagttatatagtatccagaaatattaaatattgctgcaataggaaaaaaggtttgtaagacatttgacatacccgcaaatagtccagcaatagaataaacttctgtgaatactaatgcaagccaatatccttttttcatgcgcgataccaaggcaataatgggagaaattgcaaagaatacacctatgccatcaagaaaatactctttcatgcaacttaaaaccagttttgtcgataaatcggaaaaatgtaaaacggattcagtcaaaaatgttatagtaaagagtaacaaataaagaagtatactgaatataaaagtaataatcatttttgctatggttaattttgtttcatttatgggaataagacgcagggatttaatagtgtcctcctcttcttcacgacaaataatatagcttcctaatagggcaatgacagcaggaagaacaaaaaaagttgaccaaggttgtaccgcgtccatataccaacctgcattgtctatataccgtgaaccgtcataaacgctctttaagccataatgtaaatctgggtcattatatacatcctgccctcctgcaaaaactatgactgctatcataatggatgcaaaaaatgtaatccaaacaatttttgaacgacgaattttttgacattcagcccaaagtaatttccacattatctacacctcactttcttcttcctagtgcaatgcttgcaaacaatactgatacaatactccaaatacaaatacaaagaaatgctaatgggacattaatttcctgtgaaaatataagacctggaatgtctttatttctcatgataataactcccatactggataatgggtgtaaatacatatttattgtcattataacaaaaccggaaaaggcatataccaatgtgatacaaattgggagaatgtatcctttttgagatgtagcgattgccaaaatcggcaacattacaaaagcagtgattacaccaatttctaaacattttttcaacaaatataaaatgcttgcccagctaaatacgacatatccagaaagtacactaaataacacagaagcaacggctgtaatcagcataaaacaaatagagtaaatcaaaacaacgaaaaatttactaaaaaagtatcccattttactaataggtacaatccaaagctgtttgagcatatcatactggttttcttcgtgtataagcatggtgcaaaatatacccaaaacaacgggcaaaataatccaaagtgtataaccaaatgcagaccatttataaaactttgttggctcaacacctgttttaccaaaataattgaagtatagtagtgcgaaaaacggcataatgagagcagacaacaacatcagccaaataagtttcctacgacgcagtttaagaaattctgtttgaataagtttaagcaatgccctctcctcctgtgatttttttaaagtagtcctctaaagtatcattacaaagttgagaactaataacagttacattctgcattacaagtgctttattgatttcacccatatccagagtagtgttataaaggcgtaaagtgtggtcatcttgaacggaataatccttcgtgttaaattgacgctctaaaataagtgatgtctttggaatatctgaaacttgtagcaggatatatttactgtttttcttttctagttcactcatactactttcttccaaaagaacaccgtggtcgataattccaatatcatcagccaacaatgagatttctgaaagaatatgactggagataagaattgtctttccatgctcaacgctcaagtccctaataaactttctcatctccgcaataccaatagggtcaagtccattggttggctcatctaaaactaacagttccgggtcatgcaggatagcgttggcaataccaagtcgctgtttcatgccaagtgaatatttactaaacagctttttatttttataaggtaagcctacaatctccaatgctctttttacagaattaggggcggctgtaccacgaagttttgcaaaaatctccaagttctccgttcctgtcagattaggataaaatcctggcgtttcgataattgcaccgatacggggatatactcgtttttcacatcccttaatattctctccaaatacatctacctcgccatacgtgattgaagtcaatcctaaaatcattttcataattgtggttttcccagctccgttgcgtcctaacagaccatatattcggcctttttttacatggagattgactttgtcaactactgtttgattcccataaatttttgtaagttgctttgtttcaatcacaaaatcattcatatataatttcctcacttttaataaatttgtttctacaaaagatagttgatacaacgtcaaaatcaactacaattagaattataaaacatgaaccttgccaaaaccttgccataatcttgcttttatcttgttttagagtaagaaagcctcgtacttttacagggctttaggaagcaatattgtaaattctgttcccataccgggagtgctgttggcggtaatatttcccttatgagcgttaataagttcctttgcaatcgccaagcctaaaccatttccctttgaagctcgtgaatggtcgcattggtacaacctttcaaaaatatgtgggagattgtctgaagatatacctttcccattatctgttattataatttgagcttgctctttgttttcaaaaattctcaatgtcattttgttgccactactatgggtaataatattttgtaataggttattaatgatacgggtatatgcatttgcgtctatacgtaagaagtactctatttctggtatatcaaattcatattcaaaatgactgctttctaaaacaggtatccaatcagatataatattacgggataattcattcaagtcaaaaatatcaaaatgaaaaacttgttccttagaatccaattttacccattcaaatagattttctacaaaattctttaagtaatgagccttattagacgcaacatggatatactcgtctttttcctctcctacaacaattttactttctactgcttccaaataaccgaccaaagaagcaagtggagtttttacatcatgggagagacttgtcattagctgtttgtaggcttgttctgattgtttttgctgaataagttgaaattggctattgattgctatttcgttaatatcatagcaaatttgttttgtaatgtcgttttcatctgttaaaatacggcgattaaggtttccattttttatatcctctaaagcatcttttataagtgtaagttgtattcggacacgtagcaggacagaaacaaggtacgctataataatcaggctaagagccaatatcaaaagtagatagacacttgtattcatgttaagcctccttattaaaacgataaccgacaccacgaactgtcaaaatataaaatggatggttggggtctggttcaatcttttttctcaatttactgatgaaagacatgatgttactatcgtcaaaagcatattcttcttcccatacttgtgtataaatctgttttttggtaaatacccgtcccttattagaagccagaaaagcaagtaaatcaaattctttgcttgtaagttgaacaggaatattattgatagaaacaattcggtttgtcttgtcaataatcatgccatttattattatgcaatctgtgtctgttataaaagcagggtttaacatagtataccgacgaataagagaattgacacgagccataagttcgtttatgctgaacggttttgttaggtaatcgtcagcacctaaacgtagtccggaaactttatcatcctcgtcatttttagcagtaagcataattactggaatattacttgtttctctaatttttttcagaacttgaaaaccgtctatatctggcatcattatgtctaaaattacaagagagagtgtgtgtctatttttatcgagcaaatgtagaccttctgcaccacaatgtgcagtaatagcagataaattttcttgctcaacacattttttcataagagcacaaagttctttgtcatcatctataatcaaaacgctattcatattgtacttcctttcttcttttcgctctaccatcaacaggcttttctgcgttctttggtatcagccacatatacccgagttttgaaactcctggtatgcgactttcttcacatagtttttgtactcttctttcagaaatgccccatttttttgctacttctgggcaagacatatattccatatttcaatcatcctttcctcataatttatcagcatatattatatacgtatagacgaacaaaatcaagaaatatcagtaagtagtactcttaattttgtagtgataaaatggtgcatggttttacttaaaatgggggagattaaaaaatcaattttagcttatatccttttatgctaaaatggtgataagaaatgaaacaaatactatttatataaaaggggtaaaaatatggatataatagataatctaagggtgcaaggggtagatgaaaaacttattgaagatgtactgtattttagaaattattatggtttagaaaaagatttagaatacagagtaacaaagtctaaaacttatttttatggtaaagatatcttgtctatgtgtatagcagctattttagaagaagaaaatatattattatcgggaccaaaggcaacgggaaaaaatttacttgctgataatctaggggaaatatttaatagacctcagtggaatacatcatttcatataaatacagacagttcaacacttataggtacagatacatttatagacaatgaagttaaacttagaagaggctcagtttatgagtgtgctattaatggaggttttggagtatttgatgaaattaatatggcaaaaaatgatgctatagttgtggtacattcagctttagactatagaagaataattgatgtacctgggtatgagagagtcaatctacatccagcaacaagatttattgggactatgaattatgaatatgcaggaacaaaagaacttaatgaagcactggtatctagatttatggtaatagatattcctcctatagaagaagataagttaatgatgattttaaaaaatgaattttcagatgctgatgaagaaaaattaatacactttgcaggaatatttttagatttacaattgaagtctcaaaatggagagatatctagtaaagctattgatttacgtggtcttatggcatctcttaagactataagaagaggattaaaaccaactcttgcaattaatatgggacttacaggaaagacttttgatgtatatgagaaagaaatggttggagatgtaattaaaactagaatacctaataaatgggagagtatagatgtatttccaataagtcatatttaatataggtgagattatgaaatggatatatgatgattatgaatttgaaaatagagctaataacttatcatggacaatagctggtgattacaatgaaagtatagatatatcagaaaaagattactcttcaaaagaaataggtctatattttgcaataattgcaggtgctagaagaaagtatgtagattgggatatagttaaaaaatatcttacaaatagaataagaaaaggatacaacaaagatattatactgggtctaattcaagttatattaaatacaatagttgaagaaaaggtcattaaagataggccagggatagaagacataagaagaaatgcttataaagatattgtttcacgttttaccaaaatacacaatgataatattatggataaaattaaatacacatttgtactttataatatggacaagcacccagcattagatagtatgactagaagaatagttaatgatataagaaatatagataccaatcaagatatgatggagattttaaaagcattagatgttatatatttaacttatttcgaatacatattaaatggagaagaaaatagtcttattgatgaaaataatgtagaaagtgtagaagtaaattttgatacatttgctgatttcatgtatgaagaactttatagtgatgaagaagaaaatattattgaaagtgatatagattcaatatcttcatccatgcttgtagaaggtgtaggggattttgatgattctaaatgtagcaattcagcagaccgagttatatatgttgatgaagacactgcaaataagatatattcaaaaatagaacattattatggaaaaacttatttgagtaaaggtgaaattaaaaaaattgagacacaaaattgtagaaatgttcatgaaggttgtagaatacactttacagatggagttcttagaagtgagtgtaataatgtatttcaactaaaatatgtaacaagacaaaaagaaaataatttaggaaaatttagagaacatgctagaatgtatagacagcaaataaagagattaaaagaaagtctgtcaagaattttaatagaagaaaatgctaaaagtagagtatattctgattgtggtactatattagcaaatagagcttggagagttggtagaagtaataataataaaatattttataaagatatagaaaatgaaaaagggaaatacgttattgatatattattggatgcaagtggctctcaaagtagaaatcagggaaatgtggcaattcaagcttacataattgcaaatgctctaacagaagttggcataccaaatagagtgatgggattttctagttttttagactatacaatattaaaaagatttaaagattatgatgatagtataaaaaatagtgaaaatatatttgaatatttttgtgctggtaataatagagatggtttggcaataaaatctatatgtagtggtctaataaatagagatgaagaaaataaaatcctgatagttctcagcgatggaagaccaaatgatgtaaagataggaaaaagtagtgagagaacattaagaggagaaaaggcttataggggtatagttggtttgagagatacagccaatgaagtgagaaaagctagaaagcaaaatatattagtactaggagtatttacaggaaaagaatcagaacttgaagctgaaagattaatatatggaaatgattttatatattcaagagatataactagattttctgatgtagtttcaatgtatttaaagaagataattagaaattaataaacttacaaaaaagaatttatatacataaaaatataaaaatgaataaaatttataaaaaatgtagaaattttcacagaaaaggtatacaatgatttatatagaaaatgatttaagaataatttaaaaattaaatatataatattataggttctttaagcaagattaatagggaaaaaggttaaattcctttacagcccccgctactgtgatgcagacgaaacttttgttagccactatgatgatattttttatatctcatgggaaggaagaggagtaggaagaagctaagtcaggagacctgcctaaaatattaaagtaatttcttcggggatggagaaagtttcttataataattatacagatatgttcattttatgtgtttgtatttggattatcgaaaattagaagcctagccatcgagttaggcttttttatttttatttttaaaataaatcagacatatattatttatattttaattattagaaagggagagaggggatagtaaaatgaaacaaaatatcaaattaggggttatagctgcacttatgttaatcgttttaactccagttacatcgaatgcaatgcacataatggaaggatacttaccagtaaaatggtctatagcatggggagttatatttataccattttttttagtaggactaaaatcaataggaaaaatagtaaagcaagaccctaaaaagaaagtattattagcgctgtgtggagcatttgtatttgtattgtcagcactaaagataccttcagtaacaggaagttgttcacatcctactggagtaggtcttggagcaataatgtttggaccaagtgtaatgtttgttcttggaactatagttctaatattccaagcattactattggcacatggaggaataactactttaggagctaatgctttttcaatggctattataggaccaattatatcattcttaatatttaaagcattaaagaaaaaagacggaaataatgcaatgccagtatttcttgcagcagcaataggagatttggctacatatacagtaacttcgatacagttagcactggctttcccagacccatcaggtggagtgatggcttcagcaattaagtttttaggaattttctttatgactcaaataccaatagcaatagcagagggtattcttactgtaattgtatataatttaattacagaaaatggagaaaaaagcatactagaaaataatgataaaggagttaaagctaatgagtgctaaaacaaagacgaaaactaatatattactacttttattagtagtagctcttatcatattcccattacttgttaattcgggagctgaatatggaggagcagatggtcaagctgagagtgaaattactaagataaatccagattatgaaccatggtttagtagcccatatgagccaccaagtggagaaatagaaagtttattattctctgcacaagcagcgttaggtgctggtgtaatagggtacatattaggtgttcaaaaaggaaagagaagttaattatgcttataattgataaatatgcatatacaaatagattaagtaaagtaaatccaaataaaaaagtagccataggagtaatctttctgattgcttctatggtaataaaaaatatatttgttttaagtggaattatgattttaatgagtattctagttgtttgtgtagctggaatagatttaaagaattatttaaaattactcagaataccaatgtactttttatttcttagtataggaataactcttgtaaatatatcttttaataaggcagacttattatatagttttgaaatttttagtttcaatgtaggaatatcaaaagcatctattgacatgtctattcatgtgttatttagagctatgtcttgtttgacttgtgtatacttttgtatacttacaacaccttttaatcaattaatattcttctttaaaaaaatgcatttgcctgatacttttgttgagctatcaatgttaatatataggtttatattcatatttttagaagaattttcagaaatatataagtcacaagaactaagatttgggtacataaatttaaaaacttcatataaatcattaggaattcttggcagtatgctgtacaaaagacttatgacaaggtatgatgatatgtgtatatcattagacataaaattgtatgatggtaaatttcacatagtaggggataatgatgtttaaaataaataatttaacttatcaatatgaaaagaataccaatgcactattaaatattaatatggatttttcaaagggaaatgttataggtataataggttcaaatggttcaggaaaatcaacattatttatgaatttaatgggtatattaaagcctacatctggagaaattctttttaaagaagaaaagttaaaatatgataagagaagtttatacaaccttagaaaaaatgtaggtattgtgttccaagacccagaaaaacaaattttttattcaaaagtatatgatgatatagcctttgcaatgagaaatattggtatagatgaaaaaataattaaagagagaataaacaaagctctagtagctgttaatggaatagattttatagatagaccagtacattttttaagttatggtcagaaaaaaagggtagcgatagcatcagttatagcaatggaaaatgaaattatattgcttgatgagcctacagctggtttagacccagtaagtactaggtctattgtagatataataaagggattgaataaagataatataaaaatagtaatatccagtcatgatatgaatttaatgtatgaaatatgcgattatatatatgtattggataaggggattttaattgatgaaggaaaggcagaaaatgtatttgtaaatgaaaataacattatacaagctggcctagaatccccatggttagtaaaagtacatagaaatatgaatttacccttatttaagaaagaagaagatttgtataagtattggaaggaaagagaacttaatacaaataaataattaagccctaaacctattttaaaaaaatagatttatatataataacccttaacctagaccccttaaaggtgccttatgattccccaaatcataaggttattttttttattaaacaattaaataaattatatggaaaaatgttatttaattgtaatatattggaaataatctattaatataatacataattataatttgaagtaattcatattttagattaaaatatatttatggctgttaacaggaggagaaatatgaatttagatacattaaatcctgctcaaagagaagcagtagaaaagactgaaggtccagtacttatactggctggtgctggttcaggtaaaactaaggtattaacaacaagaatagcatatcttatagaagataaaggtgtacaagcaccaaatatattagctataacatttacaaacaaagctgcaaatgaaatgagagagagagttgaacaaaatataggtcctgaaactaaggatatgtggataagtacattccattcttgctgtgttcgtatactaagaaaagatataaataagattggttacaatagaagttttgtaatttatgattcagcagaccaagttacattggttaaagactgtctaaaagaattaaatttaagtgataaagtgtttgaaccaaaagcagttataagtgcaatttcaggagcaaaagacaaactttatactccaaagcagtttaaagatatcaacatggcagataatagaatggttaagattgcagatatttatgcgttatatcaagaccgtttaaaaagaaatagtgcacttgactttgatgatttaatacttaaaactgtagaacttttcaaggctaatgatgaagtattagcatattacagaagtagatttagatacataatggtagatgagtaccaagatacaagtaaagctcaatatgaattgataaaattattagcaagagaacatcaaaatatttgtgttgttggagatgatgaccaaagtatttatggatggagaggcgcagatataagaaacatacttgaatttgagaaagattatgacaatgtacatgttgtaaagttagaacaaaattataggtctacacaagtgatattagatgcagctaataaagttatatctaataatatagaaagaaaaagaaaaaagctttggagtgaaaaaaaagaaggagaacttataaagatacaattaactggtagcgaaatagaagaggctgatttcattgctgattcaattgcacaaatagctagaaaagaaaatagaccttataaggattttgcagtactttatagagcaaatgcacaggcaagacctgtagaggacgctttaaatagaagtcaaattccatacaatatatatggtggtacaaaattctacgagagaaaagaaataaaggatttgttggcgtatttaagagttattcaaaatccacaagatgatatatctataaaaaggattataaatgttcctagaagaggtatagggcttagaactatagaaaaaattgaagatagagctaacttaaaacaggaaagtatatactcagtattaattgatatagaaacaaattcagatatatctactaaggcaagggcaagtataagtggatttgttgatattatagggactcttagaactataaaagaagtttatcctgttagcaaacttatagaaaaagtcttggatactacaggatatatggacgagcttgtagagataagaaataaaaatgaaaaagatttaacaggcaaaggtgaagaagctcaagacagaattgataatttgagagaatttatttctatagctttggagtttgaaagtagtaatgatgatacttatgaaaataaagacttagagacattcctaacaagtatagcacttacatctgaatcaaatgatgaagaagacaatgatagggtttcgcttatgacaattcatacatccaaaggtttagagttccctgttgtgtttttaacaggtatggaagaagggttatttcctatatcaagagctataaaatctatgagtgattcacaaatagaagaagagagaagactttgttatgttggtataactagagctaaagaagagctatatatgtcattgacagagaagagaacattatatggtaaaacaaatgttgcaatagcttcaagatttatggaagaactgccagaagaatgtatagaaagattgtacaaagtaaaaaaagaactaagctattctaaagcaagttataatatgttagataaatatactaaaaagtatatgagtactataagcaaatctaaagttgcagataaagttaatgctacaataaaagattctaataaagaaactaatccagatgatataaaacttggttctaaggtacatcatcctaaatttggggttgggacagtggtttctataattggtacagatgttactatagcttttgaccaacagggaattaaaaaaataaataaagaatatacaacactaaatattttataatggaggtaaatgaggaatggatagtataaactttgctaaaaacttaatagacttcatatatgatagtccgtcgtcttttcatgcagtcgagagtactaaggaaatcttagataaaaatggatttgaagaattagttttgaatcaaagatggaatctaagagttggtggaaagtattatgttactaagaatctatcagctatagtagcttttgtagtaaattcagaagatatagaaagagatggatttagaataataggctctcattcagattctcctacatttagtattaaaccaaatgcagaaatagaagctgaaaaatcttatttgaagttaaatacagaatgctatggaggagcaatattaagtacatggttggatagacctcttgggatagctggtagagtagttttaaaaggtgatagtatattaaaaccaaatgaaaggcttatagactttaaaaagccaatttgtataataccaaatctagcaatacatttaaatagaagtataaatgatggtcattcatataataagcaaaaagatatgttacctttagttgggatgttaaatgatacattagaaaaagataattttcttataaagcaaatagcatctaacttagatgtaaatatggaagatattatagattttgatttatttttatatgaatttgaaaaaggaagtttaataggggctaatgatgaatttatatctattgggagacaagataatcttgcaatggtacatgctagtttgaatgctcttgttaatactaaaggtcaacaaggtgtaaatgtaatggctgtatttgacaatgaagaagttggtagctctactaaacaaggtgcagattcaaacatgttgttaaatatattggagagaatttgcatatcaatgggtaaggatagagagggattctttgagtctatttattcatcttttatgatatcatcagatttagctcatgctattcatccaaacattccagaaaagcatgacccaactaataaaccaataatgggaaaaggtccagttataaagataaatgctagtcaggcatatactagtgatggatattctatagctatttataaaaatatatgtagagaagttaatgttgagtatcaagaatttgttaataggtcagatgaaagaggaggaagtactataggtccaatatcttctactcatatagatataccatctgtggatgtgggaagtccaattttagcaatgcactctataagagaattaggaaatgttgaggaccactatagtatatataaaacatttagtaagttttttgaaatataaatataagataaacaatttggagatgagactatgaaattaggattatgtttagaaggtggaggagcaaaaggggcttatcaagcaggagtagttaaagccttgtatgatggaggaataaataaattttattcgatttcagggacatcaataggagcaataaatggatattatttgtacacagggaatgttgataacttggagaaaatgtggacaaatataaaagatatccagaatggaaatgtaaaaatagtaaataatactgtggataattctcctgctatagacaacctaagggaactagatgatagtaatatagaagaaatgaacttttatgttaattatgttgaagttgataataaagtagtatcagaaaagattgttgacatatcaaaaatgcctcgtaatgaagccattatcagcatttcatacagtgggttgttaccatcaaatccaaacgcaactcttggatttaaagaacaatttgtgaaagatgtgcaagaaggaatttatgatggtttcaaattagatggaggtttaattaggagtgcattaattgaaccattaattggggataatgtggataaaattattttaatatccacaaaatataattatgagttgccagaggatattaaaaaagtatatgatgaagataaaataatagtagttagacctaatactcaatttgctcctaaagatacgcttaactttgatgatgagttttgtaaaactatttatcaagaaggatacgaaataggaaaaaatatacttgatagactttaatttagagtataatataataaatgtaattatgtaatttaactaatgaaaaggaaggtaataaattatggaaaataaaaatcctatagtaactatagaaatggaaaatggaaaagaaatcaaaattgagttatatccaaatatagctccaaatacagttaaaaactttgtatcattagtaaatgaaggatattacaatggaataatatttcatagagtaataccaggatttatgatacaaggaggatgcccaaatggtacaggaatgggtggcccaggtcactcaataaaaggtgaatttagtggtaatggatttactaacaatttaaaacatgaaagaggagtcatatcaatggctagaactatggcacctaattcagctggttctcaatttttcataatgcataaaaactcaccacacttagatggtcagtatgcaggttttggtagagtgatagaaggtatggatacagttgatgaaatagcatcagttagaacagattcagctgataagccacaaactccacaaattatgaagtctgttactgtagaaacttttggaatagattactcagatgtagaaaaaaactaaaacttatataaaaactagattgagttataaataaaaattaaaaatatatattacttaaaaatgaggataaagtgaaatgttattatgtttttagacaaatacatttcactttttaatttatttgtattgtggaaagctatatattgtatgattttaactaaaaaataaagttttattaaaaaaattttattatgattgtttatatatttatttttaaataataatgtattaaataaatatataaaatatgtggaaaacacttatttcagtattttttaaacttattttatttattctatttaataaaaataaggttttttataatttttacttataaaaaaatattgttatggtaatatattctatttacaattttataactttggtttacaataatagagacaataaatcctaaaaaacataataagaaaaaagtgcttaatattttagaaagactggtttagtttacaccagctaagccagtcaaggaataatttaaagtgtaatatataataatgaaaaagaacatgctattagaagtttctaatgacatgttctttttttgtagaaatcagcattattatataaaaatttaatactataaattttaattgtattgtaactaagcatgtattttaaacatagtatgatatagacccaaaatggagggattataaatgagaaaaattatactttatttaaatgatgatacttttatatctaaaaaatatccagataaaaactttagtaatttagattattgcttaataggaagtaaatgttcaaatagttttgtaaaagaaaagttgattacttttttttaagtgagaataccagatatattaaaagacaaaagtatattaaaagcagagttatttattcatattgattcaaataagaatcatatttttaaagaaaaagtagatattgaaattaaaagaataagtgaatattataatttacgaactataacatggaatgatagagtgtctatggaaaatatcaggggatatttaccaattgggataagtgatacatccaactatatttgtttaaatattacgggaactataaaagcatgggcaatgaataaatatcctaattatgggttagctttatctttaaattacccttatcagatttttgaatttacatctagtagggattgtaacaaaccgtatatacttgtaacatttgaagatagaattatagataattgttatcctaaatgtgagtgtcttccaattagaattacaggtccaatgggaccaagaggagcgacaggaagtataggaccaatgggagcaacaggtccaacaggagcaacaggcaattcctctcagccaattgctaacttcctcgtaaatgcaccatctccacaaacactaaataatggaaatgctataacaggttggtaaacaataataggaaatagttcaagtataacagtagatgcaaatggtacgtttacagtacaagaaaatggtgtgtattatatatcagtttcagtagcattacaaccaggttcatcaagtataaatcaatattcttttgctatcctattcccaattttaggaggaaaagatttggcagggcttactactgagccaggaggcggaggagtactttctggatattttgctggttttttatttggggggactacttttacaataaataatttttcatctacaacagtagggatacgaaatgggcaatcagcaggaactgcggctactttgacgatatttagaatagctgatactgttatgacttaaaacgtgtctaaaataatcttaaaaactatttaggttttatttaaatgacaaaagtatttttatatattgagttttacctattttagaatgaataaaataacaataataataaaatatattcataaaaattttaaatttatggatttttatttaactttattatcaatatatgtataataaaaaactgtctcaaatatagatttgagacagttttcgttatttaaaaattttatattatttaaaatttttgattgcagtagttaaattagggactaattgtttttttcttgatacaacacctggtgcaaatgtaccttgaacaccttcaacatcaaatgcgttagcaattaagctatcttctgctttatagattaaataagaaccttctttgattatatctgtaaccgcaagaattagtttgtcataatcagtcgaatttatataagataaaaactcatcttttttagcaaatatagagtctatgtctaaggtaaatacttgtccaataccaactctatgtccactcatattaaattctttaaaatccatatttactatttcttctatagtatattcatctaaagaagtaccgcatttaaacatatccatagcgtatttttccatgtctacttttgctattttacttaattcttcacaagctttcttatccatatcagttgttgttggagacttaaataataatgtatctgataatatagcagataaaagaagcccagctatttcataaggtatctcaacattgttttctttgtacatttgataaattatagtactattgcatccaacaggcataactctaaatgacataggaacatcagtagaaataccaccaagtttatgatggtcaattatttcaactatgtttgcttgttcaattccatcagcactttgagcatattcgttatggtcaactaaaacaacattctttttagatgggtttaatagatgaccttttgaaactaaacctaaaaacttattatcatcatctaatattggataagatctgaagtttgtttctagcataatctcttttatttcatccatataatcatcttctttgaatgtaattaaattttctgtagcttctatagagtctaagaaactacattgatttattacattagaagttttataattgtcactttcaacagaaacaacagacactccatttatcttagcaagagctagcaaatcttttgaaatctctgtatgattagtaagtattaaaagtttaacttttgtatcaatagcatattcaatactatcatatctatctccaacaatagctatgtctccttcttttaaagtctctattagagtctccattccaaatgataaagtgactactctaccttttatatcttcaccacagtccacaagaatagtaccattaaggtttttacaaatgtttgatagtgatgtgtgtatagttgtaaagtgttgatgaagtagatttttagctatttctttcatagtaatgataccagcaaaagttccatcatcataagttacaggtagtgttttaacatttttttcatccataaggttataagcctctaatatagatgaagttggtgttaaaggtactactttatcataatttaaatctctaacttgtattctaacattatctaaaatttcaggtgcatctaccttaaagtaatccaaggcatatttagcttcttttctgatatctcctaaagcataagctgttgcttttattcctagtttgttctttaaatgtgctaatgaaattgcagaacatattgaatctgtatctggatttttatgtccgaaaactaataaactcattttaatactcctttcaaaacttgaatataataataattgataaaaatattatatcaaaaggtagtgagtatttgttgtaaaaagaaaaaaatttagtgaaaaaatattatataaaatttatttcttacataaatactacaaatttaatataaaaattattattatatatatttttacccaaccaaacatagaatcaaatttacttttatttaaaataaattgattaaatctacctgggaaaaaattaattaatatgttaataaattaaaaatttataaatattttatactgtaaaaaattttgtatatatattatcattaaaaaattaacggtcttaatataaaaattatttatctatatgaaaagcataattattacatattgacttaaaaataacttatagagattagaataattttagtttgtatattttttaaaaccatacagttgttataaaaagaaaaattgcacacaagtcaaaaataagtgttattttataaaaatacgacaaaaattttatttactacttatacaaataacatgcaaataacatataaaatttaataagtaaaaaaaatgaaagatataaattatcattttagtattttatttagttgaagtaaattattcaaatgaaatatatctcatttagataaaaaattttagtaaaagtaaaaaaaataatatatttgttaaaaaataaattgacaaaatattcagaaaaaaacttcttgacctaagagagtaaaataaataaaatctaaggtatagagatgaaatctataaaattattttaagtataagttaaaaatatagatggtgcatttaagatttataaaaattagagatgcataattattttagggaggtttttagtatggagaaaaaagaaaaggtagtagaaaaatcaaatgttgaagtatgtagtcctgaaattgtcaacagtgttgaaacattaagaatgagattagaagaaattagattggcacaaaaagaatttgcaacatttacgcaagaacaggtagataagattttcttagctgcttcaactgcagctaatcaacaaagaatacctctagcaaaaatggcagtggaagagactggtatgggtattgttgaagataaggttataaaaaaccattttgcctcagaatatatctataatgcttataaagatactaaaacttgtggtgtcatagaaaaagatgaagcatttggttttacaagaattgctgagccagtaggtgttttatcagcagttataccaacaactaatcctacatcaactgcaatattcaaatccctaatagcactaaaaactagaaatggtataattttctctcctcatccaagagctaaaaactgtactatagaagcagctagagttgtacatgatgcggcagttaaggcaggagcaccaaaaggacttataggttgggtagatgttccttcgattgaattaactaatgttgtcatggcagaggcagaccttatattagctactggtggacctggaatggttaaatctgcatactcttcaggtaaaccagctgttggagttgggcctggaaatgtacctgcaataatagatgagagtgcagatataaaaatggctgtaagttcaatcttagtatcaaaatcattcgataatggtatgatatgtgcttccgagcaagctgtaatagtaccagaaaaaatatatgaagaagttaaaaaagaatttaaataccgtggagcacatttcctaaataaagaagaaactgaaaaagtaggaaaagtagtaataattgatggttcattaaatgccagaatagttggacaaccagcacatgtaatagccaaaatggcggatgtagaagttccaaaaacagctagaataataattggtgaagtagaatctgttgaattaaatgaaccttttgcacatgaaaaactttctcctgtacttgcaatgtacaaatctaaaagttttgaagatgcagttgctaaagctgaaaaattagttgcagatggtggatatggccatacatcttcgttatatgcagactctataaatcatccagatagagtagagaagtttgtaaatgctatgaaaacttgtagagtattagttaatactccatcgtcacaaggtggtataggtgacttatataactttaaattagcaccatctcttactcttggttgtggttcttggggtggaaactcagtatctgaaaacgtgggagtgaaacatttacttaatatcaagacagtagctgaaaggagagagaatatgctttggtttagagcaccagaaaaggtttatttcaaaaaaggttgtttaggtgtagcagcaagagaatttaaagatgttatggataaaaagaaagcctttatagtaacagattctttcctttacaataatggatacactaagaagctaactgatttgttggatgagatgggaattaagcatactacattctttgatgttgctccagacccaacattagcttgtgcaagagaaggagctaaggctatggctgatttccaaccagatttaataatagctgtaggtggaggtagcgcaatggatgctggtaagataatgtgggtaatgtatgagcatccagaggtagacttccaagatttggctatgagatttatggatataagaaaaagagtatatgtatttcctaagatgggtgaaaaagcgtattttgctgctatcccaacttcagcaggaactggttcagaagtaactccatttgcagttataactgaccaagattcaggtgtaaagtacccattagcagattatgaattaatgccaaacatggctataattgatgctgatatgatgatggagatgccaccaagattaacagcagcatcaggtgttgatgctttaacacatgcattagaagcatatgtatctatgttaagaactgaaccagctgacggtctagcactacaagcaggtaaaataatatttgaatatctacctcgtgcatacaaaaatggaaagaatgataaagaagcaagagaaaaaatggcaatggcatctactatggcaggaatgtcttttgcaaatgccttcttaggaatatgtcactctttagcacataaattaggtgcattccaccatgttcaacacggtgttgcaaatgcattattaataaatgaagtaattaagttcaattgtgcagaagctccaaataagatgggtgcattctcacaatacagatatcctgattgtatacaaagatatgctgaatttgcttcttttgcaggaatcaagggaaatacagaccaagaaaaagtagataaccttataaaagcaatagatgaattaaaggcaagagtaggacttcctaaaactataaaagaggctggagtagaagaatctaaattcttagaaacattggatgttatggttgaacaagcttttgatgaccaatgtacaggtgctaatcctagatacccattgatgagtgaattaaaagagatatatctaaaagtttattatggtaaataatattcattgtacaacataggttctattgggtttgtatataaattattagatttgaatataaatagagttttattagagaaacgtagaagtaactataaataatagattataacttaaattctgaatggaaatgataaaaagtcagtaatttaatggtaatttcgaatatgtgtatttaatcaattaactttaaaattagtcggaaaatttttttattacatataattttaaagcataatatataaaaaactttatgaaaaaattataaaaatattcagaaaattctattgactaatttatttatcatgatataataaatttagaaaagaaaaaaattggggcctattaaggcccccttactattttttgatagatttatttaaaattactttctcattttgattttttatatttattatagagtcagtataatccacttcaaagttggcaaaagcagagaataaatctatatctcttaacaaatgaattgtcatacattgattgttcttatttatccttagaatcaatgctcttacaaatggaaattgtattctagaattaaataagttagaaccatcagtatctatatctaagctacgataattaatatctataaatatatctacatcatcattttcttctcttattattctgtagtcaaaatctaagtttaaatttaaattatctaaaatcaataacatttaaatcctcttttctataaatagttttagagtgttaatttaagctctccatctattatagatataattctatctgcttttctagcaatattttcattatgtgttattattataagtgtttggttatatttttttatagaactttttagtaaatccatgacttcttccgtagttttactatccaaatttcctgttggttcatctgctaggattatacttggttttgcagataaagcgcgtgcaatagcaaccctttgttgttgaccaccagataattgatttggaagatgatttttcctctcactaagacccaataaatttataatgtcttcgatgtattcttcatcaacttttttattgtctaactttagtggtaattctatattttcttttacatttaatactggaattaggttatactgttgaaaaacaaagcctactttttgtcttctatattttgctaattttttatctgaaaggcaacatatatctttaccatcgacttttatagttccactacttggtctctcaagacctcctactaaatgtagaaatgtgctttttccacttccacttgggccaattatcgcaacaaattcacccttatttatttttaaatttgcatcctttagtgcatgtacagctgtttccttttttccataaatcttacctaagttaagaatctctaatataggcataattaatcctcctattctgtaatgtttatagcttcaactatactaattttatttattttccttaatggaatatatgtagctagaatacctacaattatgtttgctaaaacaactaggatatatattttgtaatctattgaaaatcccaatccatatgatacaaaattatacgtgtaatacattctaaactgtattataagccctaccacaatggtaattacacttgagagtattccatataatattccctcatagagtatcatatttttaaatcctctctcagagataccaatagctcttaacattccaaattcgctagttcttgaagttaagttataacttatgttatttattatattaaacacactaattataaacattactgctactattccataagcataagtcagagccctagctgtcatcttatcaaagttttctttttccattagcatattagctgttgtagttccaggagattcacttcctatttcacctaagagtgtatttatcttttttacatttgcatttttattaatatctacataaactacattatatttatctacaccagttagtttttttagatagtcgttacttgttattacatctataccctgatctccagaatataggtaattatctgcaaaaggataacttacaatagctccaactttaaactcatattctagatattcataattatcttttagttttatataaagatcttgatctatctcaccttttggatatttgacctttatagtatctcctacttttatatctacagcaggcgtttctgtaccaggagtataacttagcttgtatttatttgttttagaaacttgtggtacgtataatatagcgaggttttcttttttcattctttccagatttatactcccactcactaagtatttttctaatgaatttatcatctcatcattgtaacctcttaacttttgtttcattgtatattttccagtattcttattttttatgaatagaggaaaatccttataataaggcgttgaattaataatattgtagtaatctaatccatttaatttatctacttctattcttgtatctaagatgctggcagttttgactttgtcaattccatttatattttttattttatctatctgattatcattaagtccttttatatccttgaaagaatcagctttattagattgatttagttttaagaaaaaatttgttagaataaaatctgcattcatatatgtttcttcttgaccatttttattttgtatatctgaaaaagaatatttataattctcctttatgatcattatacctcctagactcatggataatataattataatgaagccctttttattcctaaagatatttttagcagatatagattttgttactgatatatttaaagttaattttgatatcaaagaattgaccttatttatatttttatcagttccaaaggtttttcttatagagtcaataggagaaattcttcttatctttaaatatgtaaagaaacttataattagtattgtcagtattatacttccaattgataaaagtattattttatctggaataacaaaaggggtaactgttacattaccttcaaattgaatatttcctgcagtcctattaaatatttgtgcaccaccaatacctgtgcatataccgataggtattgctatcaaagcaagtatgaaaagttcataaaacataaacttgaaaatcttgaagttagtggatccaatagctcttaagataccatattcctgtattctttgatatatcgatataacatagatactatatattacaataccagaaaataggctcatagtaattgcagtgtatttacttgagttatctaaagtaccattttccctagtagattctataagcattttgttttttccaacactattctcatccaacatagtattttttactatattatctatgcttgtatttatatcaatgccattattaaattcaatataagcataagaaaatttatccaattttgattcattgagatttaaaaaaatttcacatgtccctttatttttctcaataggtctatcttcaagtattcctacaactttaaatgtctctggtttttctttttgatataatttaaaagtaatgttctgatttatttctggttttaaacccagactatttaaaatccatttctctacgaccacctcattactagcttttggaaggtgaccttttataagtttggattgattagtcaagtaatttttatttgcatattctaggtttatagctaatctttcattaggatctgtatagccatagtgagatgttatacctaaatttttaatatcttttctagactttatgtattctaattgatttttatttatatctttaaagtatacatgatcacttccagtttctctttttaatttatctacctctgcttgttgagcacttcttgagagggtaccaataccaacaataagtgatgtagcaagaattatacttagagcaattgctaaagaccttgctttataacttattatgtatcttagtgctatttttaaattatctttcatatttaccacttcctttcttagctaaatcaattatatgtttatttaaaatatatatcaaagtaagtatcttcaagttttgagtacttaattgtacaaatttatatgtgtatttgcaagtttaattaatgtacatgtaaattttgactttttacataatttttctaaaatgatataatcctcatataaagtgtagatgggaggggaattatggagaataattttatatttcctatagtaatactaactttgtttatatttagtaatcttataatgaataaatacaggttttataaagaattagacatattaaaaagaggaatattaacgttttttgtatcgtgttttgtatggattttattcatggagggtattgagtatatacaattaagtttaggatataattttttacttgaaggagtattaaatattatactttttttaattttaattattttaagcttttatataggatttaaatttataagattactagacaataacaataaacaagagtataagctacaaaaattagacagtaaaataaatcataaggacaatataatcgtaaaattaagaagtcaaaaacatgactatttaaaacatttacaagtagtatattctctattaaatactgggttagctgaagatgcaaaagaatatataacgaatatatcaaatagctttaaatcaaaaaattcaagatatgggaaagtatcttatttagatgctatagcttccttaaaatatgaggaatgtcttgaaaagaacatatcttttgatgtatatatccaagattttatggataatttagagattgaacctaatgatatgagttcagtgctattaaacataatagacaatgcaatagaatctttgtctgctatacaaaaggaaaagaagtatataagattacatgcatatgaagatgaatttcagtatattatagccataaaaaataatggtcctaaaatacataatgtcgaaagtatatttttggatggatttagcactaaagaagggcaagacagaggttttgggttatatctagttaaaaatatactagataagtatgattatagtatacttgtaaatagtgacgattttttaactgaatttgtaattttaataccaaaatattattagttaggaggagagaagtctgtgataaaagttttgatttgtgatgatgataaaattgtaagagatgatatagcaaatatagttaaagagtccggatatgtagattatgttaagaaagtcaaggatggtatagaagcaattgaatttataaaaagtgagaaaatagacttattgattattgacattgatatgccatataaaaatgggattgattctgccaaagaaattctttctatagataaagatatacatatagtttttgtaacaggttttgctgactatagtcttgagagctttaaagtacatcctatagattttatagttaagccgtttaaaaaagaaaaaatacttgattcaattaatatagcaatagaccacattaactctcataaaattgcaaaaaataattttatagaagatactctttttgtatataaaataaggaaacagatacatatgattaattttgatgatatagtcatgtttgagaaaaattcaagagctattaatttatatactagagatgaagatacgataaaattttatgagaactttgatgatttaaaaaaacgcctacctcctaatttctttatgactcatagacaatacatagtaaatttaagacttatacataaggttatacctataaataagtcttctttagagataaaatttataaattttcaagaaagtgctactttaaataaatctttagaaaaagattttctatacagattttatagggttaaaaggttttaatgaagaaaaaaattttcagtgatatacaatatgtatgatgaagatatcatataaatttgctatagttataaattaattcgtataaaatataatataaaacatattggactttcatggaaaattagaaagcccaatatgttttagagataaatcttatatttataagttgcttaagatactagggtctttaatcttattatcttcagcaagtaataagattttagacataatctcagcagtcttagggtcttcatcagcgaatggaaggaatatcttacctctactttgagaatgtacaggaagtatattcaaagcacccatcccttttttatgtacaataccagaacccatatgcacagaatactcacctaaattacctgtgataagaacatgagagccttcaaaattgatattgttaatttttaataataataaaagttctttagcaattgctatacgcatctctacagtagaatggctagtttcagggtcaacaccaccagcatgagcgacacttacaacaaggtctatatcacgcataacttctgagaatagaattggaggtatagaagctaattctaaacttttataagtttttctatcaaaaaattctactgtttcaatagtaggaggctctatatctgctggtgaaaaccaatctgcaagtgcaaacatctttgccactatattttctttataaaatactttctgtaatccctcttcataatcgacagtccaaagctgatttctaagaagtgctacagttttctttggctgaatttggtgaccagcatatctgcgagatatagttttttcagatatttcatcagaatttattctataatactcacggaatacttgcttaaatggttgaacaagttgcttactaaataaatcatgttggaactcactccacttaccagattcaaacaaatgaactggatgtgcaagttttaatttattttttgctgtcaacttataagtttcaccttctatattgcaaataaagaacttagacttatcattataaacatatccaatattatcatcacatacccatactagatttttaatcaaagggcagataactggatttttatagatattggcaatttctttaactgtaaatactatttcatttttcatagcttgttctaaactctgttttgcacgagaatactgactctttaaatctttttggacagatttaagttcaagtacatatggatgtttagcaatagcttttggtatactctttaaagacttgttgcctttttgaactttagtagatgcttttccgctttcatcaacatctatccaaattgaagtaccatcaatatcttttggtttaaatagatgagcaacttcatttagtttttcagtctcaagagcccacatcatacgatttacatctccaaatccagcacttctagctagattttctagcgctatagtacaagcttttgattcactttcacgacgttgtgcaccaaattgcttgctttctttagcaaacttttgaataaattcataacggaaagttgcttcttttaggtctccttttttcataggaagtaaagagaaacttctcaatttatcttgatttctatttgtttcaatttctttcatcaacatgtctttatcaagcttaccaagtgtagcatcagcatagagttgtgcacgtctatgagagttaccaccactagttatatatttagctgacttgtaaagtatattgaatctttcttccccaatagttttatatgaatctaagaaccaatctacatcaaatgcaccatcaatgaaactacgtggtgaaataggggagaatagagcaacctctgattctttttgtgcagagaagccttcatttatatgtgcatggaagtaccaaattgtacttttcagacccttccagtttaaatatttttcaattatgtttacccattgaggggcatacatagcagattctattaatcttaactcagtaatgtcggtatttttaagtaaactttttaatttttttgaatcatcttctttagtaggatagcaatttttaagtagagaacttaaaacatctttttttgaataattgctaccatatgaatatcctctctggaaagtttctttaccaagagcgaccaaaatatttacaaaataatctataccttcaaagtattgtatattattagctagatgagacacttctgttggcatatcacctctacgtgattcaatttctataattcggtttgtaacagtttttaaattatctttaagccaagggtacttttctaatgtgtcaccagcccatctaggatttgttaatgttcttattatatttgatgcgttgtatccacttatcatttctctattaacttgctcttcagtcattaaacctaattcatgtgcacgagcaaacacatttatgctagtatagaaaggaaacttatattctagcaactgataatttgaaaacgtagtgtagaaaaacttagtaaaagaaatatcatcataaataaacgaatgtgctttatcaagccaatagtttaaaataggggcatttaaagcagggcagtattcattttgtctgtaatagtttttagtaaattcaactctttgttttttacattgttctatagtcaataagtttctaagtttatagtatatttctaaacaatagttaaatatttctttatggtcaaactcatttagtaaaactcttaaaagttttcttgtaagtccattaaatttaaatttttcaagttttgtatatattttattttgttttttagagtcaaggacatttgaatatatagatgaaaaccaacttttttctgtttcattatatccacatgtacttatactataaaataagatatcaagtattaatttgtaatctaagtcaagctttttactagtttctctccaaagttctgccaatggataattatcaagagtatcattagaaactttatatttaataggagtcaagttataagtagaataacctaaaagcactttgtctacattacctgaccatctttcaacttcatattcataatctgcattttcagtaataagctcatcaaatttttcataaacttttattattttatttatatccgtatcgagaattttttttgcttctttttttgttgctacagaaacagaatcctcactagtagataaacttatatttgaaataattttattaagctttgatgagctattagaatcatctttaaaatcaaattgttctggaatttgaactttgttttcagggttatatattccaaaaccattttctttgcagtaatcattttttgctttacctaacaaattatcaattaatatttgaacttgagatgtattctttttagatttatcaatatcctctataagtaaaataagcttattatatagttcttgtctatcagaattgtcttttaataagtttacaatttcaagacctccaaggcatttttgagaatttgaagattttatcagtgaagaagcaatattttccaaatttgaatcatcttgttcaagtaaaatttttattactgtttgtctaatagagcttgtctttaaagacaatagattggttatcttatctaattctacatctgttagctcaagctttctaagtaaactcaataccgtttctctattggaaacactcttatcacttaaacattccaataaaaattcacgttgtctatctgtctttggttcatttacaaaattgactataagtgaagctcttaaatctgaactcataagatgacaattttccataagcacatctataaattgagcattcatatcgtatgctgttaaagtcatcatacatttaagtatttcatgagaagaaatttcaatccaagtccatggaaatacacttcctgaaaatgattttgtctttgaatttaaaatttctaaagtatgttttaaactttcaaattgttcttttctagcatcaaagtctttgtcaataggagtgtttgacaagtcaaaattagtttctctgttttgccaactatagtagtagccaacagaaccttctacatagaaatttgtaattacccatgctagtatctctaaatcatcacccttaatgtttttagatgctatagaatgtttaaaatatgtactttctgtatgcgataaaaagtaaagagctacaagttttttatatttttcctgacaagaaagtaagttttcaataagagagtaagagtcatatatgttgtaagttgcagtagcccataaggcaaaataaatttcaagattatcattgctattaattgattctatacggaacttttcatcagtcaatgatttatatgaaagttctaaacatttacgtattattccaggtttttggtctgaaaaaccaagtcctgtccatgtatccaaggctcttataacagaactaaatcgctctaaattgttgtccaaaatagtttttaacatgtatattgatgcagaaattgtaccctcatctaaactctctacaatttgctgtctaagtccttcttgttgtttggctgccaaaagaagtttagaaagcatttcatagcatttatcactatgactcttcatgataccaattatcatttgtcttgtaagtagagcagtttgattttctccaaatattacttcttctaaggcacttgttactttttgatttcctttgtctatttctagtgctattttatcactcattatagagtcatagtacaagaccttatttggaagagtaagataatctataactgaaaaatcataataaattaaatcaacatagtttgaaataaaccttataatacctctaaaataatccacaagtttatttgagcgataccctttacgataatatcctcctgaatatgtataatccatctttcttttaattaattggcaaagttcttctacttgttcagaagtaaatattaattctaatgcattttttaaaggtccagaaaggagctcgtccatatttttaatttcgtagtagtggcaattgtagtatttctttatcatatttaagaatttgtcctcaggttctctataatagtatgaactattttctatgcagtcccaaagagattttgctaagtcgtagtactgttttgaagaagatttagtaaaattatttttaaaattttcaattattttaggatttttttctactctagtacgttctaacatttatgtacctccaaattatttattttaaaacattcttccagcaagcaaggtaagtcttataaaagtaaatatatctccacttttcagatttataggggaatcgagtttttcaataacatcttcatttataagcactttgtagattccatcttcaaatgcctgtaacgctacttctattgccttttctacagattgtttattctcattgtaaatagagccaaatccaacttttccaatatcagcttgagattcaatttcttcattagttaagaagtttattattgatttttctgggattttctcattatattcaagaacatttttagatacaatttcagagatagcttcttttaggcaattgatgttgtcagatacatcaaaaggggtaagttctaacataggtttgcgtttgccaacagccttaactctaaaataaatttgcataaaatcacctcgcaaaatattaattatgtatttagaaatttaaaatttatctatttgttatattatatcattttgtgaattattaatgtgaattatggaattattttacaaaaaatagaaaaaaagctatcttaaagtctaaaaaagcaataaaagataacttttaactataattatatagaattataactgtacatttattaaattttaattttagaattatttttgataactatctttttttatttataaattttgttcctaaatattttttgatatcttcttcaggagaaaagtcatcaataagtatttctttcccagtgtcttcaaatactacaagaacttcacagtcaccttgcaagaaaaattttctaactgtatcttctttaacttctctaacttttattacattctttttttctttttcaaagtcttttgtgtaataacttcccatcatattaattatttttgtatatctattcataaaatacctccatatgcgattaaatttaaaaaatatgttataataattgtttgtattaacttaataattataacaaggagtaataataatgactagtataaaaaataaagatattttaaattgtatagattattccattaaaaataagctctttgacaaactaaatgatgtatataagtccttgccagtaggaaattgttctggatgtggaaattgttgtatggagtcagtaggtataaatttaattgagtttttgaatatattttgttatcttgaagatagagttgatttaaaaaaaagctgtataagtaaaatattagattattattttgaggagtatacaagaaagaacccatgtccatttaaagatactaataatagatgtctaatatatgaagttagaccattaaattgtaggatgtttggacattggaaaaaagaggattataataaaaatttagataatgttattgagaaaaataataactatagagagttaatgaaaaagcaatatggatttgaaataaatgatgaagtagtaaattacaggatagattattgtgatagatttattccaaataaagattatttaagtaaatctaagagattaagcttttttgatgagcttatgatattagactcaaatatttattcaagtggaaatatagatatagactttagggatagaggtatagttgaatattttatagagtcattactttatagaaatttagcatataatgtgaaaataaggatatctaaagaatacaaaataagaaaaagaactatagatagaataaaaagaattgttcttgtatagttttatattagtaagtaataaattgtatcataaatattgtcaaaatgaggtgaggaaggtgaatcttacaaaagtaaaaggaaataccttttttataaaaggtggcacgaatacaggaatatatgtatttgaagataacacagcacttatgatagacccagggttatgtggttcaagacctaggagagtaaataaagtattagatgaaaataatatacaggttagatatattataaatactcatggtcatgatgaccactatggagcttgtaatcaatttaaagaatattataaagatgtgtgtataatgtcatctgaatacgacaaattatatatagaaaatccagaattgttttcaaagtatattgttgggggaaagagcaatgtatttatggataatatcttaaaaaataaaatgttggatgatataaagatagataaatctatagaagttggaaaaattgaattaaacaatgaaatgtttgatataattgagtttcagggtcatacacctggtagtatagctgttttgacgaaggataatgtgatttttgttggcgatttattgataggagatgaaattctatcaaaatacgatttcttgtttctatatgatatacaagaacaaataaattcattagaaaaattaaaaaatatagattttgagtacttagttttagggcatggcaagcaagttatatcgaaagaagattcttataaattaatagaaaaacatttgaatgctttaaaaaaatatttatatcaaataagagagttgcttgtagaaccgaaatctttagaaattttattaaaaaacattataaataacaataatttaagcaataattataaagagtatcatttttttaaatcttcgttagtatctgtcataagttacttagttgatttagaagaaatagggtatatattggaaaatggagaattgctttactatacaaaaacaaaataaattatgataaaataaagaaggtcataaaaaacaaataaagggtgagcaatatggaatacgaaaaatggaatgagatactagcaccttatgaacatgcagtagaggaattgaaaataaaatttaaaaatataagaaaagaatatttagcaaaaggtgaatattctcccatagagtttgtcacaggcagaacaaaaaaaatatcttccataatatctaagttaaaaaggataaatgcaaaagatatagaaactgaaattgatgatattgctggtataagaataatgtgccagtttgttgaggatatatatgctatagttgatttgataaaagtaagaaatgatatgactataataggagaaaaagattatattacaaattacaaagatagtggttatagaagctatcatgttataataaaataccctataaactccattgcgggttcaaaggaaattatatgtgaaatacaaataagaactcttgcaatgaatttctgggctacaatagaacattcattaaaatataaatatgaccattacatacctgagactcttgctgaaaggcttagaagagcatctgatgctgcctttcttttagaccaagaaatgagtgaaataagagaggacataatgaaagctcaggctatgtaccaaatgaagtctatagctattagagatactctaaatagaatacaagagttatatgacttgggtgatacacataaagctatgcagtaccaaagaaaacttgatagaactgaaacagataaaaatataactgaaattttggaattaaaacaagaaatagatatattactagagcaatataaggatactaaggtagatgataaagtagttcagtaaaaaactacttgtagaaaatttgctaaatattaatggggctgcctcttaatggaaaataatttctaaaaagagacagcctatttagtgtaattaagaaaggaatgatattatgagtttgtatgctataggtgatttacatttttcaacatcagtcaataagccaatgaatatctttggaagtaattgggatggtcatgaaaagaaaattatagataattggaaagaagttgttaaggaagaagatatggtcttagtactaggagatacatcttggggaattaatttatcggaagctaaaaaagatttagatataataagcaaacttccaggtcagaaaatacttataaaaggaaatcatgattactggtggacaaccgttacaagtttaaataagctatatgaagacatgcgttttattcagacaaatttttatgaatataaagattatgcaatttgtggaggtaggggctggatatgtcctaatgatgttaaatttgatgagactgatgaaaaagtttataaaagagaagagcatagacttagactatcattagaatctgctcgtaaaagtggtcactcaaaaataattgtgattactcattatcctcctacgaatgataaattggaagaatctttatttacaaagttatttgaagaatataatgttgaaaaggtgatttatggtcacttgcatggtaaagaatcttttaaaatgggattgaaggggattcgaaatggagtagaatatacattagcatcttgtgactatacagaatttaatttaataaaagttcacgattaaaaaacataaattggtaaatactataagatacatgattaaaaataaatatttgagggatttcggttttgagaaaggagacacgacttatgaggtggatattagtttttatatttttatatcttattcctttagtagtgatattcagaaattacaagaattttaagaggtcttgtatctacagtagtatttatgtggtattagctacaacaataatgataagtaatatttatatgagtggacttaataaaataaaagagtctatgtattatcacaattatatttctgatgagacatatgatgaaaagtatgtatcaaattttaaggaaaaagaaagtaccgatttaaaacaggataataaaaagaatgaagaaatatcaaataataaaaatttaaacaacaaacaagatagaaatatacaaaataaagaaagtaatgaagaaggaagtaatgatataaaagaaaagaataattctgatagtaatgtttcagtgaataataaatcagaaaaacaagaagataatacaaaagaaaataataaatatacaagtaaagaaaaaaatagtgaagatataaaaaaaatagatatggaaagtataggaatttttaagaaagaaatttataatatagaaagagcagctttagttccaatgagagaatgtataccttacactaaggatatagcaaaaaatataactaaattatctagtataaaaaaagatgttacaaatgccagaaacaagtgtaaagaagttgtaaaagaatatgaaaatatgcagattccagaactttctaaggagaagtatacagaaacattgagtaatgctagagatgacgtaaagaaagcatatgagcttagagaaaaatctatggaaagtgctttgaaattaataaatactaaaagccctaaatatatagggaagataacagaatatcttgatttatcagataagcagatagaaagttttaaaaatagattgaacgatttaaaagaagaaataaataattcagaaacaaataatattaattaataagatttaaagatataagttaaaagggagattatgatgaataaacagagtataggaaaactaaatatgttttttatggggattactcaaagaaaccttgataataggcatttttttattgagttagaggtgatttttaaatctggaagaaaagagtttaaaggaattgcaatagaggaagataataaatataaatttaattttaaaggaaaatcagatttatatacgtttaatgagttgcttaagaatatttctaaagaggcagaaaattatgatggattagtatttaaatatgttgagcgaggaactattgttgtaattgaaggagacaataagaaggtaaatgtaaaatatttagataataaagaagaagtacctaaaatagatgaatttacggcatctcaaataaaaaacagagattattatgtaaaagtaggacaagcaaatgcacttttaaaagaaattggagtacttacaaaagatggtaagataaaaaatgataaaataagaaaatacaatcagatagaccattttgttgaattgatagatagtattttaaaagaaataaaggataaagactgtataactatcttggattgtgcttgtggaaaatcttacttaagctttgtcttaaatttttatataaaagaagtattgaagaaaaactgttattttataggaatagattattcagatgtagttatagaagcatcaaaaaatatggctaaaaacttgggttataaaaatatgtcatttataaaagaggatttgactaattatacacctaatagggatgttgaccttgtaataagtctacatgcttgtgatacagctacagatatggcaataggtctaggaattagagcaaaatctgaagctatagtagtagtaccatgttgtcataaggagttattagggcaatatagatatgaagctatggaaccaatattaaaacatggtgtatttaaagctagatttgcagatttgataactgatggtttaagaacattgttattggagggcaatggatatgatacttctgtagtagaatacatatctccacttgatacaccaaaaaatttaatgataagagcgataaaaactaaaacgaataatgacaaagcattaaaagaatataaagaactgaaatcacaatttggagtggaaccaaccttagaaaaacttatatattagttaaaaatgtaaaatttacgaaaagcttgcttaaatatgcaagctttttggtattatataggtatagtcatatccagagttttgatttataattaaagctgtgctataatatttgattaatcaaatcaataaatgttacatggaggtaaaaatgaacaaattgaatatatgtattgatatagatggaacaataacaagcccttatcattttcttccatacctaaatgatatctttaataaaaatataactgaagcagagtgtataacacataattgggaagaattgtatggttcgggaataagagatgtgtatgcggagtttaataataagtatatacactcatatgatgaagcaaagattgtagagggtgctacagaggtaattagcacattatctaaaggacataatttatcttttgtaacggctagacatgagtgtttaactgatgtaactaaaaattggctatcgagacaaggattttcagatatagatgtttacttattaggaagtgattataaagttgaaaaggcaagagaactgagttgtgacatatttatagaagataatcctttaaactcagtgcaactagctgatgatggtgttaaagtaatacttctggatactaactataataaagatgttaaacatcaaaatatagttagagttagtaattggatagatattgaaaagattataaaacaaggtatttaaagatttgtagattgaaagggggagcatatgatagatttaaaaattgaaaatagaaaaggaaaaatccatgtaaagagcagtgaaataaaagacattttagaattacgtccagacttcgaatatgtacaagatatatcaaatactataaatcaagaaaatatattggtatttgattgccagttgacaggaaattcttttgatatggatgatttagatatagaagaaatattggaagagttaggtgaagaaatagatgagtcttatttcagtgttttatttgaagatgtaagagcgtatttaaaagatgctactgatgagatagaagcagacttacaagataattacttatttgataatttgagatgttattttgatatatacaatataaatcaagaatttacagattttaagtttgtatttttagtttcttttaaagatataaaaatttcttcattagcaaacctagctaagattgtttctaagagacagcttataggtgcatctaagttttatagttaaaatgaaatattattataataaaagctagtagccttgtaaaaatataggttactagttttttatttgttcactttcacaaaatttcagaaaactatttacattctaaaaaaagtaatgtatattaaacataatgtacagtataatggataaaaagtttctattaaattactaagtttatttaataatcaaaataatttatcttatattagtatgtattagggggtatttatgcaaagtttaaatgaaataatcgctgaaaatttaaaaaagataaggaaagaaaaacatcttagtttagacaagattgcacaacttagtggtgtaagtaagagtatgctatctcaaattgaaaagtgtgaggtaaatcctactatatctactttgaagaaaataactaatggactaaaaatctcatttacatcattgatggagaggcaggaaagtgacatagaattgattcaaaaaagtgatatagaccattttattgaagataatggaaagtatataagttatccaatatttccatttgactccaaaagaagatttgagatatttatgattgaaatagaagaaggtggaaatttagattcaaatgctgaacttccaggaacacaagagtttataactgtttttagtggcgaagtaaccattaaaataaatggagaagattacattgtatctagtggaaattctataagatttaaagctgatgtatcacatatatatagaaactcaggcaaaggtatagctaaaatgagtatggtagtatattatatataaataatttaatggaattagagtgatatttagatgattttaggtatgaagatatattatatttaagttataggagtgtgatttatggatgaataataaaaaagcagtttttttcttttgtagtgatttaaagaaagacccagtagccagtaatgtgataaagtgttgtgaagaaataatggatttaaatcaaactgatattgttattgatgataattttgtattagaatttaaggataaaaacaataacttatttcattttgtaaaaacaaaagatgtaataagtcataattataaatattatcttccaattttaaatagacatttcagagattatgattttgcaggagttgtaaattggcatgagggagaaaatgctccagaacatatcctaacagctcatacaattggagatgttccaacaggagaatttggaaattcaaatccaagatactttaaaaatctaatcaatgctattgaggatataaaaaatgaaaatctacttgatgaatttactacattaacagaagcaactcactggtctggaacaacatatggtgaagaatctaaattaattacagaatattctgtacctatgttggatattgagataggaagtagtagtgatagttttaataatagtatagcaatacaggtattggcaaaatcattaattagagtatttgattgtgatgaacctttgaagactttattatgtgttggaggggtacattttgagaaatctttctcagatattataaaaaataaagaatataacatatcaattggacatgtattgccaaatcaatggattgtaagtggaatgtatgatgatgaatcgggatttgagaaactagaaaagtgtataaatagtattgaaggtggaattgattgtatagtttttcatgataaattaaaaggtacctataaagagcaatgccgtaaactaggtgaaaaacttaatgtacctgtatttaaacataaaatattaaaaaatcccaaagacttacctatatggtagtcttatacagttaatataacaataagtcggattaatttttaagcgaggtcaaaaatgatattatcttattttgcattattaattagagtagtgctattagcttttgaaagagtagttgtaagattattaggtgatgaagaaggagatatttataaaaatatagcttcatcatttctatttttctttatagggggagtatgtttacttccatttagcataatggatagagttagtgattggtcgtttttaataccatgttatataagtagtttagtctattcaattggttcagtagcgtatgtaacgtctttagcaactggggaagtttcacttgttactccaataaatagtttaaattcattgtttttactgcttttatcagttatatttttaggtgaaggtttaagtttagcaaaagttgcaggaatcataattatgattggtggagtgtttatattaaaaaaagtaagctcttttttaaagaatgtctctgtaatttttaacaatttaccatgtagattaatgtttttatacatatttttgcagtcagtaggaagagtattggataaggctttttttgtacaagtatctcctatattatattcaactatactgtattttttcgtaggtttaaatttatttatctttttagcatttaaaaagaaacaaaaaataatttgtgagatttttagtaataaaaaggggctttcaattttaagtggtgctattaatggatattcttatttagcattattaattgctttaaataatctagaacttagtatagcagagccattttctcaagtatctatgataataactttaatacttgctcattttatattcaaagaaaatataaaagaaaaaataccaggttcaattttgatactaattggtgggtggctactgttactttaattgacataaaaaatgaattataaaggtgctattagttagtatcagaaaatttaaaaaagtattgacaattcttttaggcaaatgttaatataataatacaaaatagtataaatagaagacatgttactggtaatgcaggcaggatcgaatatattgctttgatttttcaaggtgtttatataggttctgccttttttgcatcttgaatggccattcataaaaaattatggagaaggagattacaagatgaattataaaaaaactgccattgacattattgaacaagttggtggttcaaaaaatattttagctttagaacactgttcaactagactacgctttaagttgattgatagaagtaaagtcaatcaggatgctttaaaaaaagtacaaggtgttatgagtatagttaatggggcacaatttcaagttgtcattggaaatagtgttgttgatgtgtatgatgaaattttaaaagtttgccctttagatacaaatgatagtactgtaaaaactgaagaaaaaataaacttaggaacaagatttatagaatttattattaatatttttcaaccactgatttttgctattgcaggagctggtattttaaaatcactgttgatgttattagcaatgtttaatattttaaaatcagattctactatatatacattattagttgctatttcagatgcaacattctatttcctacctcttatggtagctgtaactactgccaatgtattgaaatgtaatcgtttagtagctattgccgctgtaggatacttattgcttccagcaacaacaactgctttaagtgaaggtgtcgaactatttggatttacaattccaaacattgcctataatgcacaagttttcccggctatcttatgtgtgtcttttttggcaacaatggagaaaatttttaacaagtattcaccaaaaccaattcgaactttctttgttcctatgatgtctttggcaattactgttccaattactctaactattttaggtcctttaggatataacgttggtacaatttttacaaccattattttattcttatataacaaaatgggattcttagttgtaggattacttgctgcttttcttccatttatggttgcaacaggaatgcacaaagcactaataccttattcaattaatacaattggaaagttgggttatgaagctttatatatgacatcttcattagcccacaatatttctgaaagtggtgcttgttttgcagtagccttgcgaacaaaagatgaaacattaaaacaaacagcattatctgcaggaatttctgccttgatgggaattacagagccagctttatatggtattactttacaacataaaagagcaatgttaggtgttgtattctcaagtgcaatttctggtacatttttaggattatttgcagtaaaaggatttgtaattgttggaccagggcttgccagtatgagtatgtttattgacccaaacaatggaaacaatttgatttttgcgagtattggttttgttattgcaatattaggctcgtttattattacactgattatttggaaggaagatacaaatacagtagagtcatcaattggagatgttgttgaagaagagctagaagaagaaaaagaagtaaatatcttagtaactccagtagaaggaaaagtaatagatttaagtaaggttaatgatgaactatttgcaagtaagactttgggagatggagttgcaattataccgaccaatggaaatttatacgcaccttgtgattcagaagttgtgatgttatttgaaacaaaacatgcaattggtttaagaacaaaaaatggggctgagattttgattcatattggaataaatactgtaagtatgaatggagatggatttaaaacatttgttaagacaggcgataatgtaaaagaaggagatttattaattcaatttgatttagacaaaatctcacatgctaatttagattcaactgttatgattgtaaacaataatggagcagattatgcttataaagtgttaaaccagtcttatggcaatgtaaaaaaaggaagtatcttgtttgatgtaaagggaggaatataaatatgagaaagtttccagaaggatttctttggggaggagctacagctgctaatcaatttgaaggtggttggaatttaggtggtaaagggtggtctgtatcagatgtagcaaaggcacactttgatgcagatgtgaaagactataaatctaataatgaaatcacaacaaaagatatagaagaaggattagcacatcctgaagatgaagtaaattatccaaaacgtcatggtagtgatttttatcatcactataaagaagatattgctctaatggcagaaatgggatttaagacatatcgaatgagtattgcttggtctcgtatttttccaaatggagatgataaagagccaaatgaagaaggtttacagttttatgatgatgtatttgatgagttgataagttatggaattgaaccacttgttactatgtcacattatgaaccaccattaaatatcgttttaaactatgatggatggtattcacgacaagttatcaatatgtttgttaggtatgtagaaactatctgtgaaagatataaaaacaaagtgaaatattggcttacatttaatgaagttgattctatgattcgtcatccgtacactactggtggtttagttcgagaccgttttaaggataaaaactttgaggaagttatttttcaagctatgcatcatcaatttgtagctagtgcccttgcaacaaaaatttgccatgagattattccaaattcaaaagtagggtgtatgttaacaaaattaacgtattatccatatacatgtagaccagaagatgttttggcaactcaacaaaaaatgagaagtatttatgcatatagtgatacgcaggtttttggtgagtatccagtatatttactttcgtattttaaaaataataacattcaaatagcaaaagaagaacatgatgatgaaattatgaaaaagtatccagtagattttatttcattctcttactatatgtcttcttgtgaggcagctgatacaactggattagatattacacctgggaatacgttattagctgtaaaaaatccttatttagaaatgagtgaatggggttggcaaattgattcaataggtctacgtatatctttgattgaattatatgatagatacagaaagcctttatttatagttgaaaatggattgggagctaaagatattttaactgaagataaaaaagttcatgaccaatatagaattaattatttaaaagaacactttaaatgtatgttagatgcgattatcgaagatggcgttgaactttggggatacacttcatggggttgtattgatttggtcagtgaatcaacgaaacaaatgtcaaaacgttatggatatatttatgtggatgctgatgattatggaaaggggacatataatcgatataagaaagatagtttttattggtataaaaaagtaattgaaaataatagtatagattttaaatgaccaatagaaggtgagcaaataaaatgaactacataataaagaaagttttgaactcgagcgttgttttagttcatgatgcaaagtataatgaatttattttgctagggaaaggaattggatatggtaaaaaaacaggagaatatatttgtggttccaatgataatcaaatgtttgtccctgttgaaaatacaaaatcaaaaaaatttttagaattaatggatgatattcctgtcgacattttaaagataacacaggaaataatagtagaggcagaaaagttattgaactcatcttttaataaaaacttatacttaatattagcagaccattttaactttgcaattgaaaggatgcgtaaaggaataaaaattacaaatcgagtattttgggaaataaaaaattattatccaaatgagtttaaggttggaatggttgcaatttatatggtagaggagagattgggcattcaattaccagaggaagaagcagctaacattgctttccattttgcaaatgctatggcttcagatggaaattcatatgatacgattaagtatgccaaagtaattggagaaataattaatatttttgttttttctttgaatagaaccttagataaaaagagtatgcattatatgagatttataacacatataaaattttttgtggaaagatttttttcagatagtatgttaagcagtggtgatgatttattatttaatcaaatgaaaaggtcaaatccaaaagaaatgttaattgcattaaaagttagagattttttagaaaagaaatatggaaaaaagttaacaaatgaggaaatagctttcttggttgtccatatcgcacgagttaagcaatagagtgaattactaatattatcttatacgtctacatggtagaaaattgaaagaaggtaaagtatataaagaaactgagacatattattttgttgttcattatgtttattttatgagtgtatcctgttaaaaatttaagttaatatttataattaaaatatacaaatagttaaaataagtttatgtggttatgaatttattttaactatttttttgtttaatggaaaatatgttttataactagaattttatttttaattaattataatacaaaaaactttataaaatcttcagaatttcttaaagaatatgtaagtaacataagatatattatatttagttggtaatataaagggggcaatatttatgaagaataaaaaattcaatgttataacactgataatacttgataatcatatttatgccattaataaagagcagattagtactaattcaaaaagaatttactttgaaaaaagtcgatttttcagtgattataagtgaataaatatatataaacatttaataaatttagaagttaaatgttttaatacgaaaggatacacatatgataaatttagaagaaaagtatttaacacgaaaagacacatatatgataaaaattctagaatacaatggacatattcgaaactggaaagttctctgtgaagaacttggaatcgattcttcattatgtagagatgagcgtgaacgagcaattttagtggaagcatataagacatggggatatgatatggcaaatcacatgcatggaatgtttgcctttgcattatgggatactgtggaaaagaaactcttctgcctaagagaccagtttggagtaaaacctttctattattatgagactgaaaatgggaagcttctctatggttcatctattcgtaagattatggagcaaccaggatttgtgaaagagttaaatgaagacatgttacagatttatatgtctttcacatatgtagcaggtgaaaatacattcttccgtggagtaaagaagcttatgccaggacattaccttgtctatcagaataaaacagtatgtattggtcgttattggaaacctgaatttcatcctgaccacagcaagtctattgaggaatggacggatgaaattcatacaacacttcagaaaattatgccagaggtaaaatcagagaatgaaactgcagagttattcttatcaggaggtgttgattcatcttatatattggcaatgtcagatatagaaaaaacaggttcatgtggttatgaggaagagcgttttgatgaatcaaaattagcacaacagacagctaatattcttgggtgtaaaaattcgagatatataattacacctgaagagtattttgcgtcagtaccttatgtaatgtaccatatggagcaaccaactggagatgcatctgctatcgtttttgctattggatgcaaggcagcagctgaaaacacaaatatctgttactctggagaaggagcagatgagttttttggtggatataatatataccataaggcagagtgttatggagagaatttgaagacattttatattggaaatacaaacattatgaatgagggtgagaaaagaaaaattcttaagaaatacaatcctgatgtgcttcctattgaagtggtaaaaggaatttatgaagaaacagaagaactagatacacttactaacatgtcaaatgtagatattcaaatatggttggaaggagatatttattttaatatagataaaatgagtactgcagttggattggaagtcagaatgcctcttacagatacaagaatatttgatattgcatccagaataccatcagaatataaagtgaaaggaaaagagaataaaattgcctttcgtacagctgcatcaaaaacattaccagaagagattgcttttagaaataaattaggatttattgtgccaattcgtatatggatggctgatgaccaatataataaggatatccgagataaattcaatagtgagatagcagataaattctttaacatagatgagattaatgagatttttaatgactacattagtggaaactctgataattggagaaagatttggatgatttacacattcctagtgtggtatgaaatctattttgtaaaatgttaatacaagaggaagaatcacctgaaagaccattcaggtgattcttaatgttttataattttacttgctaattcttatgtctaactcttaatggtatatcaagtttttttgccagttgtttagattcttctatttcttctggagatatttcatctactactgaaaaagctacttcttttatatattttttgcaatctcttgcaaaacctaacatatagtcaaatgatttttctccaaactttggttgagtaactctattataagcttctttatttggggcattaagacttattgatactgtatctataacatcttttaacagaatagctgtttttttgttatgtattaaatcacttagaccatttgtatttattcttatttttatgctacttttttcttttataaactttgctacctctatcaattcatttattctcattaatggttcgccatatccacaaaatacgatttcatcatagtcgtctaaattgtatttattgaaggcttcttttacttcatctacacttggctcatgctccaaccataaactaccactatttgcaacttcatctttttcgtttcttatacaaaaaacacaactacatggacatgtattagttatatttacatagatactattttcaattgtatataagatattcataattttccctccataaatttaaattcttaattaaaataacgttttttaaaatcaagtttatcaagtgccatacctaagattataaaaacaataaaacttcctattggctgtaataagccaagtaagctcattacaaatgcacttgtaaaacttccaataattataccttcagcaaacatgtataaaactaatcctactatacctgctacaaccgaagcaactatatttctcttatttattatcttgtcacttttagaagtgaaaaataatacaagtattggttttatgattatagttggtattacccagatagcagcacctgtagataaatcagctagaccagcaccaattgcagaagcagctatagcatagtttgttggcaaaatagttgcagctagataaataaaagcatctcctatatgaacatatccattgtttccaccaactggaatatgtaatatatatgctattgtcaggcatattatggatgcaaataatgctgaagtaacaatataggtagtttttttagaagtaactttattcattttttccaatatactccctccctaaaaatccagagctaacataattgttatgttttcttataaatatattaatattaatcatacaattttcatagtttgttaggtgttttttttgtaaaatacagattgtacccattcaaatgtatataattagaaaagtaaaaataggtaaaatgtatagagtaggagtagttagagtaagttaatataaatttaatttggtataaataagaggagtacaagtttaatataaaaaataatataagagagtctactcaatatatactgagctgactctcttatatttgggaaattaaaggctattttgttagataatagctaattaatgaaaaaatatatttataaaatactaatttactctattagtagcagttcctgtttttataacttctacagcactacttaaactagaataaactatattttcaatcgctgtactagtgaagaaaccaaggtgatgagtgaatataacttgttccatagaaagaagtttatttatttctgggtcagttaattctccaggattcatttttttgtttaagaacaatccttcagtttcaaatgtatcaagggcagcagctctaatttttcctgactctagtgcttctattaaatcccctgtattaattaaaccaccacggccagtatttactatgtaagctccatccttcattatagctagagtatctttatttatcatatgttttgttccttcaagtaaaggagtatgtaatgttataaggtcagcttcttttagaaggtcttctaaagaatctttgtaagttaatatatcatttaaatcactatttggatattggtcaaatgcaattacattagctcctaggcctttgaataattttgcagaagtagcacctatttttcctgtacctataacaccaactgtaatagatctaacttctgttccaagaagttcagctatccaacggtaatcaccttcacagacttttttctttactagaggagtctttcttaaaaggttcatagcttgagtaacagctaattcagctattgcattaggtgaataagaaggaacgtttgtaacgataagtccattttcattaactaaatcaaaatgtatcatgtcaacccctgcagttcttgaagctataactttaaccccagcatcttttaaagtttcataaatataaggattatctatatagttagtttgttgtatagatataccatcataccctttagctttaactacattttcttcagtcatgttttcaggataaatatccacttgaacatccttatgttcttcagaccatttttttattactggttcttcataatcgcgtgctccaaatactagtattttcatatcaataccctcctgtaattattaaattattatggtaatttttcatttagaaataatatgtagcatataaggttatattttttatacaaaatttttaaggttaaaaatttagttttgaaattgttttccctgtgttattttgatatttagtaattttttatttaatgtaataattactctaaaatttatcaaagaaattgttattttttagattaaatattattaaaaaattatctaagtttgaaattagttaactaacttgctgattaattacaatgataacatgtgtttttgagtttagcaatgaaaactttttttgaaatgtcaagctttttcataaaaaaatatataaaaaaaacttttataagcatagaaagaatagcaaaatgcaatggatagtggcaagatgccacgatatgaaaaagattattcaattgcatattgttaaaaaacattcaaatcaagcgatattttgattaaatataaagttggcacgataaatgcttaacaatataggtgtaagacaataaaacaataaaaaataattttaataatttttaagttattttagataagattaggaactttgacatcagacagttaatatcagaaaaaagtattttatgagtgatttaatcgaaattttataattgatactattaaggaggaaaacgttatgcttttagaaggagttaaagtagtagaactttcaagtttcatcgcagcaccatgttgtgcaaaaatgttaggtgactggggtgcagaggttattaagattgaacctatagaaggtgatggaataagagttatgggtggaacatttaaatctccagcatcagatgatgaaaaccctatgtttgaattagaaaatggaaataaaaagggtgtaagtattaatgtaaaatcaaaagaaggagtagaaatattacataaattattatcagaagcagacatatttgtaactaatgttagagttcaagcattagaaaaaatgggtatagcttatgaccaaataaaagataagtatccaggattaatattctctcaaatattaggatatggtgaaaaaggacctttaaaagataaaccaggatttgactatactgcatacttcgcaagaggaggagttagccaatctgttatggaaaaaggaacatctccagcaaatacagcagcaggatttggtgaccactatgcaggtctagcactagcagcaggaagtttagcagcattacataaaaaagctcaaactggtaaaggtgagagagtaacagtaagtcttttccatacagctatatatggaatgggaacaatgataacaacagcacaatacggaaatgaaatgcctttatcaagagaaaatccaaacagcccattaatgactacatataaatgtaaagatggaagatggattcaattagctttaatacaatacaacaagtggttaggcaaattctgtaaggttataaatagagaatatatattagaagatgatagatataataacatagattcaatggttaatcatgttgaagatttagttaagatagttggagaagctatgttagaaaaaacattagacgagtggtcagctttattagaagaagcagacttaccatttgaaaaaattcaaagctgtgaagatttattagatgacgaacaagcttgggcaaatgacttcttatttaagaaaacatacgatagcggaaatacaggtgtcttagttaatactccagttatgtttagaaatgaaggaattaaagaatatacaccagcaccaaaagtaggtcaacatactgtagaagtattaaaatctttaggctacgatgaagagaaaataaataactttaaagatagtaaagttgtaagatattaattagtaattctagattttttaaaaggagaatgctaaagatgtacacaatgggattagatataggttcaactgcatcaaagggagtaatcttaaagaatggggaagatattgtagcttctgaaacaatatcctctggtactgggactactggaccatcaagagttttagaaaaattatatggcaagacaggtcttgcaagagaagatattaaaaaagttgtagttacaggatatggaagaatgaactattcagatgctgataagcaaataagtgaattaagctgtcatgctagaggggtaaatttcataattccagagacaagaaccattattgacataggtggtcaagatgcaaaggtattaaaattagataataatggaagactattaaactttcttatgaatgacaaatgtgctgcaggtacaggaagatttttagatgtaatggcaaaaataatagaggttgatgtatctgaactcggaagtatatctatgaattctcaaaatgaagtatcaataagcagtacatgtacagtatttgcagagtctgaggttatatcacatttatctgaaaatgcaaaaattgaagatatagtggcaggtattcatacttcagtagcaaagagagtttctagcctagtaaaaagaataggagtacaaagaaatgtagttatggttggtggagttgctagaaatagtggtattgtaagagctatggcaagagaaatcaacacagaaattattgtacctgatatacctcaattaactggtgctttaggagcagcgttatatgcttttgatgaagcaaaagaatcacaaaaagaagtgaaaaatatataaaaagagggatgaaaatgtctgaaaaaaaagaagctagagtagtaattaatgatttattagctgaacaatatgcaaatgcatttaaagctaaagaagaaggaagacctgtaggttggtcaacatcagtatttcctcaagagttagcagaagtatttgacttaaacgtattatatccagaaaaccaagcagctggagtagcagctaaaaaaggttctttagaattatgtgaaatagctgaatctaaaggatattctattgacctatgtgcatatgcaagaacaaattttggtcttttagaaaatggtggatgtgaagctttggatatgccagctccagatttcctactttgctgtaacaatatatgtaatcaagttataaaatggtatgaaaatatttcaagagaattagatatacctttaataatgattgatacaactttcaataatgaagacgaagttactcaatcaagaatagattatattaaagctcaatttgaagaagctataaaacaactagaaattatatcaggaaagaaatttgaccctaagaagtttgaagaagtaatgaaaatatcagctgaaaacggaagactatggaagtattctatgagtttaccagcagattcttctccttctccaatgaatggatttgacttatttacttacatggctgtaatagtttgtgctagaggtaaaaaagaaactacagaagcatttaagttacttatagaagaattagaagacaacatgaaaactggtaaatcttctttcagaggggaagaaaaatacagaataatgatggaaggtataccttgttggccatatataggatacaagatgaaaacattagctaaatttggagttaacatgacaggtagtgtttacccacatgcttgggcattacaatatgaagttaatgatttagatggaatggcagtagcatatagtactatgtttaacaatgtaaacctagaccgtatgacaaaatatagagttgattctttagtagagggtaaatgtgatggagcattctatcatatgaacagaagctgtaaacttatgagtttaatacaatatgaaatgcaaagaagagcagctgaagaaactggattaccatatgctggatttgatggtgaccaagcagaccctagagctttcactaatgctcaatttgaaacaagaattcaaggtttagttgaagtaatggaagaaagaaaaaaacttaatagaggtgagatataatggaagctattttatctaaaatgaaagaagtagttgaaaatccaaatgcggctgtaaaaaaatataaaaatgaaactggtaaaaaagctataggttgtttcccagtttattgcccagaagaaattatacatgcagctggaatgcttccagttggtatatggggaggacaaacagaattagatttagctaaacaatatttccctgcatttgcatgttcaataatgcaatcatgtttagaatatggattaaaaggtgcttatgatgaattatctggagttattataccaggtatgtgtgatacactaatttgtttaggacaaaactggaaatcagcagtacctcatataaaatatatatcattagtacacccacaaaatagaaaacttgaagctggtgtaaaatacttaatcagtgagtacaaaggtgtaaaaagagaacttgaagaaatttgtggatatgaaatagaagaagcaaaaattcatgaaagtatagaagtttacaatgaacatagaaaaactatgagagactttgttgaagtagcttataaacattctaatactataaaaccatcaataagaagcttagtaattaaaagtgggttctttatgagaaaagaagaacatactgagctagtgaaagatttaatagcaaaattaaatgctatgccagaagaagtctgttctggaaaaaaagttttattaacaggtatattagctgattctaaagatatattagacattttagaagacaacaatatatcagttgtagctgacgacttagcacaagaaacaagacaattcagaacagatgtaccagcaggtgatgatgcgttagagagattagcaagacaatggtcaaacatagaaggatgttcattagcttatgaccctaagaaaaaacgtgggtcacttatagtagatgaagttaaaaagaaagatatagatggtgttatcttctgtatgatgaaattctgtgacccagaagaatacgattatcctttagttagaaaagatatagaagatagtggaatacctactttatatgttgaaatcgaccaacaaactcagaataatgaacaagccagaactcgtattcaaacttttgctgagatgatgagtttagcgtaagttcattaaaataaatttactataaaatatgaaaattggaggaagctatgttatataacaaagaacaagaacttttaagaaaagcagtaagagattttgttagtaaagaattagatactttaccagcagaaatggataaaacaggtgtaatgcctaaggaattaatcaaaaaattagctgatgcaaaatttataagcagtaatatcccagaagaatatggtggtgggggagcaggatatgtttcttacgctatagtaatggaagaaatagctagaagatgtgcttcaacagctacttttgttacagctggttcttctcttgcttcattaccaatactttacaatggtactgaagagcaaaaacaaaaatacttaaaaggtatagcaacaggtgaattaataggagcatttgggttaactgagccaggagctggttctgatgcaggtggacaacaaacaacagcagaattagttggagaccactatatattaaatggtagaaaaactttcataactaatggaccattctgtgatgtagctatagtaatagcagttacagatagaagtaaaggacttagaggaacatcagcgtttatagtagaaagtaaatgggatggtttctcaacaggagctcatgaagataagatgggtataagaggaactgaaacttctgacttaatatttgaaaacgttaaagttccaaaagaaaacttacttggaaaagaaggtcaaggatttaagatagcaatgggtactctagaagttggtagaataggtgttgctgccttagctctaggaatagctcaaggtgctttagatgaagctgttaaatatacaaaacaaagagttcaatttggtaagcctatagctaaattccaaaatactcaatttactatagctgacatggaaacaaaagtttgtgcagctagaggattagtttatgatgcagcacaaaagagagatgcaggaatgagagttgctcaagaatctgctatggctaaatactatgcatcagaaattgcaaatgaagttgcttataaagcattacaacttcacggtggatatggatttataaaagattatgaaatcgaaagaatgtacagagatgctagaatcgtatcaatatacgaaggaacatcagaagttcaaaaaatggtaatttcatcaaacgtattaaaataataaataatctaatgaaattggaggtatagactttgaaaatattagtttgcgtaaaacaagttccagatactaacgaagtaagaataaataaagaaacaggtactcttataagagatggagttccaagtatattaaacccagatgatgcaaatgcattagaggaagctttaaaaattaaagatgagcatgatgatgtaactataacagttataacaatgggacctcctcaagcagactttatgctaagagagtgtttagctatgggtgctgatgatgcaatattattaagtgatagagcatttggaggagctgatacttgggctacatcaaatactattgcagcgggaatatctaaagtaggtgactatgacataatatttgcaggaagacaagcaatagatggagatactgcacaagttggaccacaaattgcagagaaattagacattcctcaagttacatatgtacaagatttcaaaatagaaggaaaagatataatagttcaaagacaattagaagatggatacgaattaataaaagtaagtacacctgtacttttaacagcagtaaaagagttaaatacacctagatacatgtctgttgataaaatagtaaaagcatataaacatgatgtaaaagtttggacaattgatgatttagatgtaaataaagaagaagttggtttaaaagcatcaccaactaaagtatttagatcatttactcctgaaccaagaggaaaaggagaaatcttagaaggtaaagctgatgaaatagctagtaaaataataatcggtctaaaacaaaagcacattatataagttggaggagtacaaactatgaatgatataaaagatttaagttcttataaaaacgtatggatatttgcagaacaaagagaaggaaaaatagctccagtagttatagaattattaggagaaggaagaaaattagctaaagaagtagatgcagaactttgtgcaatattattaggaaaagatgttgatggattagctaaagaattaatcacttttggagctgacaaagtttatgttgcagatgatgctcttttagaaaaatatacaactgatgcatatacaaaagtaataaaagatgcaatagatgaaataaaaccagaaataatgcttttcggagcaactcatataggtagagacttagcacctagaatagcttcaagagttggaactggattaacagctgactgtactaagttagaaatagacccagaagataagaaaataaaacaaactcgtccagcatttggtggaaacataatggctacaatcatttgtccaaaccatagacctcaaatgtctacagttagacctggtgttatggataaagctgaaaaagacgaaacaagaactggtgaagttatagcattagactacaaaataactcaagatgatataagaactactgttttagaaacagttaaaactaagaaagatttagtatctcttacagatgcaaatgttatagtatcaggtggtttaggattaggtggaccagaaggatttgaaatgcttaagaaattagctgacaaattaggtggagtagttggttcttctcgtgcggctgttgatgctggatggatagaccattctcaccaagtaggtcaaacaggaactactgttaaaccaaacctatatatagcttgtggtatatcaggagcaatacaacatttagcaggtatgcaatcatcagatttcataattgctataaacaaaaacccagcagctccaattttagaaatcgctgactatggagtagttggagacttacatgaaatagttccaatgcttatagaaaaattagatagcgttgatgatttattagaagctataaaagcttaatagatacaaactatataaatattactgattgaataagtcttattagttagtaacataattattaaccctttgataagttattgctagtgtgtatttgtcagttattaaaaagtctgtttgaataaaattttataatacaagataatctggataatccttatatgtatattgcttacaaattgtgagttatattctgtaaggattatctttgtttttttaaataaatcttaaatttaattaaattgtattaaatagacaaataattactaaatatgtgataaaatacaattaaaagcaaaatgaaatttttaacaaactataatcattaaaattatatcttagttacgttttaatgaaataaactacttgaaaagacgaatattataaggagttgattatatgtgctgatggtatttattgtaagcaaacaataaattttgtatgtagttcaataaattacttaatgaaaggtgcgaatattaatggataataatttaatagggcttatagaacatgtagaaaatccagccattttatgtaaagaatcaggcgaaataatatactgtaatcatctaatagatagtatttttagttttctagatataaaaaagcctagaaatataaatgaattagattcaaattttgacaaaacagaaatactgacagatagtaaaaagaaaatagctttcagagagttaaggatgactgcacatatatacaatatgaaagataataataatgaaaataatatagtttatttatttgagaagtctctaatatctgataaagtaattgaagatataatagagcatatagatgaagttgttgttgtgtttaacaaagatggggtaattgaaaagatgaacactgtcagtgatgagatattaccttttaaaagaactgaggtacttggtagaaatataacagaccttgtgagacaaggattagttgaagaaccaataatattaaacatgcttaaagtgaagaaaaagatttatagaaatatcgtttacccagatgggaagcttattgcatatacggcagttccaagatgggattctaagggaaagcttacaggaggagtactaacagggagagatatttcaagggttattaagcttgaatctcagataaaatatagtgatatatcagaagacacagagtatataagtcaaagtaagattatggacaatataaaaaaagttgttaagagagctgcagcctcagattcttctatatttataaatggagaatcaggtgtaggaaaagaaataatagcaagaacaatatataagtatagttcaaggagagacaaaccttttatagctataaactgtggagctataccaaatgaattattagagtcagagttttttggatatgaagaaggttcttttactggagctaagaaaaaaggtaaaaagggactttttgaagaggcgaatggtggaactattttcttggatgagataggtgagttaccaatgcagatgcaaaaaaaattacttagggttatacaagaaaatactattactagaataggtggtagtaagcctataaaaatagatgttagatatataagtgctactaatatttctcatgaagaccttagaaataaccttaaatttagacaagatttgtactatagattaagtgttattccagtaaaaatacctcctcttagagaaagaaaagaggatatagtaccattagtaaattatttcttaaaactttacaatgaaaagtacaatagagaagtagaagtttcacctaaagttattgagttattagaagaatattcttggccaggaaacataagagaattaaaaaacatcattgaaagatttgtagtattatcagctaaaaatgtaattggagaagatgaatttaacatgctgataaatttagatatgattgataatgaaacagatgatttatcaccaatagtggtaaatggaattatgaatcttaatgatgcatataaaatagtggaccaaataatgataagtaaggctataaataagtatggttcaataacaaaggctgctgaagttataggtatatatccttctaccatccatagaaagataaagagtggacatattcacgtttagctgtcagtttaaaaagacaatataattaaaatattataagatacataattgatacaacttaaaagagatggcttaaaaataaatttaattactttaagtcatctcttttcttttataaatatttaaaagttatattagtttatagagttagcagaacctaaaacatcatctatcttgctttcaactacagcttgtatagcatctctaccagcaccaatgtattttcttgggtcaaattcttttggattttcagctaagaattttctgatagcagcagtcatagctagtcttaagtcagtatccatgtttattttacaaacagccatagaagatgcttttcttaacatatctacaggtacacctttagcaccagctatatttccaccaaattcattacatgtagcaacagcgttttggtcaacagcagatgcaccatgaagaactattgggaaacctggtaatttgctttggatttcttctagtatatcaaatcttaatttagcttctcctttgaatttgaaagcaccatgagaagttccaatagctattgctaatgaatcaacacctgttctttcaacgaactcaactgcctcagctggttgagtatacttgtgaacatcagaagtaacatcatcttctgttccagctagaacaccaagttctgcttcaacaacaacacctttagagtgtgcatattcaacagcttctttagttattctaacattttcttcaaagtcaaaatgagaaccatctatcataactgaagagaaaccagcatcaatacaagttttaatagcatccatatttggaccatggtctaagtgaagagctacatctacacctatttcatcagaagcagccttaaccatttcaactaatgtatgaggtccagcatatttaacagctgacatagaagcttgtatcataacataagaatttttagctttagcagcttttaaaacaccttgtaattgttctaagtcacttatgttaaatgcacctatagcaaatccaccttcgtaagcttttttaaacatttcttttgtagtaattaatgccattttaaactcctcctattaacttttaaaatttacccatcacttatattataacgttaaatcaaaaaaagtatatagtaaattgtaataactataaattacaagtataatgttaaatagaagacaataggattaaataaaataataaagaatataaataatttaggaaaattagctatataatgctaactataagggtaggaactaccttattagtttggagatactgataacaatagttgtcttgaccaagaagttaccacttcaaacgttatcgaagggaattaagtggatgataattcactaaaaatttaaaataaaggagataaactatgccacagataaaaataagaggaattaatgaaaatgatatatgtaaaataagtaaaaaaatgataaatgatttagttgaagctgtaaaatgtccaagagactactttgaaatagaatgtataaagtcagttgcaataagagatggtaaaatagcagatgtatatccttttgttgaagtagcttggtttgatagaggacaagaagtacaagatatagtagcaagaataataactgatagtataagaaataatttagatgtagaaagtatggatttagcatttacagtatttgaaaaagaaaaatattatgagaatggagagcatttttaatggctaaaaagcaacgtatagataaaattctttcaaatttaggttatggaagtagaagtgaaataaagaagtattgtaaacaagggtctgtagtagtaaatggaagtgaagtttcaaatccaggaactcaagtagacactgaaaatgatgagatattatttaatggagaagaagttatatatagagaatatatatatttgattaaaaaatagctacgtacactcgtgactttagtcatgagttagtagctaaaatagtcagcatatagggaaacttatatgtagagataggatagagcctatccaatactacttgaattgctggaaacccctaaagctaaccaaactaaaacataaggatgaaataaacctaagtgtgaaagttacgaaagtagaaaaaattggttagatggtataaggttaaaccctaagtactttaaaatgggcaatcagcaggtaagctccgaataggagaaacttcaacgactattcctcttgagggaagtacactacaagctatcggtagtggaagtgggtagaccttagcggataatgccgaaggataagatatagtctgtgcttgcatgaaagtgtaagaagttcataagagaactgcataggtagtagcgaacttatgtgaacgacaacctcaaaaatgataaaagttaagacttacggttcttaaatatgttatttaaaattaaatataaaaccttctaaataattgttttaaataattacatttgttaacattattataggtgattaataaattgttcaccacagcattatataatatattaaatatgataaaatcattaaaaagtgtatcaaaaaacaattaaagtgaggtgatagcagtggaaaaagcttataagtttagaatgtatccaaataaaaaacaacaagagttaattaacaaaacttttggatgttgtagatttgtatataataagtatcttgctaaaagaatagaagtttataaaaacgataaagaaacttttacttataaacagtgtagttctgatttgactaatttaaaaaaagaattaaaatggcttaaggaacctgacaaattttcactacaaaacgccttaaaagatttagataatgcatataaaaaattctttaaagaaaaagcaggatttcctaaatttaaatcaaagaaaattaatagattttcatataaaactaactttacaaatggaaacattatgtattgtggtcaacatataaaactacctaaacttggtatggttaagataagggataaacaagtacctaaagggagaatacttaatgccactatatctaaagaaccaagtggtagatattatgtatcattatgctgtactgatgtagatattgaagtatttgaaaatactaataatcagataggtttagatttaggaattaaagaattttgtatctcaagttgtggagaatttatagaaaatcctaagtatcttaagaagtcattaaacaagcttgctaaattacaaagagaattatcgagaaagacaatcggtagtttaaatagaaataaagcaagattaaaagttgcaagacttcaagaacatatagctaatcaaagaaatgattttctacaaaaactatctactaaattaataaaagagaatgatattatttgcatagaagatttacaagtaaagaatatgattaggaattgtaaactatctcgcttaatttctgatgtgtcatggtcagagtttattcgccaattagaatacaaggctaattggcatggtagacaaattgtaaaggtaggtaaattctttgcaagttcacaaatatgcaataaatgtgggtataaaaacgaggaagtgaaagacttaagtataagagaatggatttgtcctagttgtaatgaaactcacgatagagatataaatgcaagtataaatatattaaaagaaggattaagactaataacaactcaaaataaataacttatgtaagaaccgtaggaactacggggatagcctgtggagaattagtaagacatattttagtatgcaaaattctgtgaagcaggaaccctgtgactttagtcatgggaggttcaggatgaataaacctgatggatatatatcagcaactacagataaatatgacccaacagtattagatttaattgatttatcatacttagcttttgaaccatttcctgttggaaggttagataaagacacagagggattattagttttaactaatgatggaaagctttctcatagagttttatctcctaagaagcatgtgcctaagacttattatgcaaaaattgatggagtagttactgaagaagatgtagaagcttttttagaaggtgtagtgcttgatgacggatataaaactatgccatcacagttaaatatattaaaaagtgatgatgaatcagaaatagagcttacaatacatgaaggtaagtttcaccaagtaaaaagaatgtttgaaagcgtaggcaaaaaagtagtatacttaaaaagattgtctatgggcaatttaaaattggatgaaagtttagagttaggtgagtatagagagttaacagatgaagaagtaaaattgattgaagaaagataataaagatactatagtaaattggaggaatgtctgtgaagaaaaaagatgttatagaatttgaagtagataaaatggaatttggtggtacatctttaagtcaagttggagatagagttatccatatgaagggtggaataagtggtcaaaaggtgagagctggagttaaaaaagttagaagtaagaaagctgaagttaagatgatagaattattagagaactcaccacttgaaactgaagaaacttgcaagcactttagagagtgtggaggatgtacactattgtctgtgccatatgaaaaacaattagaaataaaagaaaaacaagttatggatttatttttaaagcaagatttatttggatttcagtttttagggatagaaggaagtccagaaaacaaatattatagaaataagatggaatatacttttggagatgaagtaaaaaatggacctttgacattaggtcttcataaaaaaggaaagcatatagatatacaaactgttgaggagtgtatgttggttgatgaagacttctcaaagatattagtttctagtgtagagtttttcaatgaaaaaaagcttccttattatagaacaatgaatcacaaaggatatttgagacatcttgtagttagaaaagggattcatactaatgagattatggttaatatagtaacttcttctcaagaagattttgatatgaatgagtttaaagatatgcttttagggattgatttaaaggctgagttagtaggtgtacttcatactattaatgatggtttagcagatgcagtccaatgtgatgagttaagagtattgtatggaagagattatatacaagaagaaattttaggtcttaagtttaagatttcaccattttcgtttttccaaaccaatactaagggagctgaggttctttatagtattgctagggattttattggagattacaatgataaggttgtatttgacttgtatagtggtactgggtctattggacaggttatggctggtgctgctaagaaagtgtatggtattgagatagttgaggaagctgttgttgctgctaatgagaatgctaagttgaatggacttactaattgtgagtttattgctggggatgtggctaaggttgttaaggatttaaaggacaagcctgatttgattattgttgaccctcctagaccaggcattcataaggatgctattagggatatttgtggatttggtgctaaggagattgtttatatttcttgtaatcctaagtctttggttgttgatttggttgattttaaggggtatggttatgagattaagatggttaagtgtatggatatgttcccaaatacgccacattgtgagactgtagttaaacttattagagaataacagggtttcagacttttatattgtgtcttaaaagtagatttgccacctatttgccaccataattatttttgggtggcaaatttattctacaatgatttcaaaaatatttaccatctggtttctcatgttattagttacatgtaaatatgtatccatagttgttgaagttttagcatgtccgagtatatgctggatatcttttatattagtaccattttctaataacatagtatcagggtttttaaaataaagtgtgtattcttctagagtagtgataattaaaatatcaaatatcactatacaaaggaaagtgcaccctttttatgtttagcaaaaacgaaatattaaaaaaacttattgaagaatatgatgtcaaaacaactacagatattcaagatatgctaaaagatttatttacaaatacaattcatcaaatatttccattgtcgaattttaacggtttaaacataatatattgactgatataataaaatcatagaatattttagggggaaatagattatgtttaagaaaaagttaatagctgttgcaatgagtataactatgattagtgtagggagcttttcgtatgctcattcaggaagaactgattcatcaggaggtcatcgtgataataaaaataaatctggattaggaagttatcactatcattgtggtggttatccagcccatttacataataatggtggttgtccttatactggaggaggaagcagttctggaacaacaacttcggttaataatgaagaaaagcaaaagaggtctgttggagaaaaaggatataatcaagggtatgaagatgggtataaaggaaattatagttcatcaaattatagtggagattatagtgatacatatgaatcaaagtactcagaaggatatgaaaaaggtaaggctaaattagaagaggaagaaaaggtggctaaagagactggatataatttagggcttacaggtgctaaatctaataatacatatgaaaaagaagttttaaaaaatgcttatgataccggatattcaactggatacaatgaatataagactaaaaagatagaagaatataaagctaaagggatagaggatagcaataaagataaagaaaaaatgacatttgaagaaaacatagattctgaatttatagatgcttataataatgcttatgacgaaatacaagaacaattaaaaaatgattacactactcaaggatttgagagtgctatcaaaggagaaagatttgacacatcaactataggtaatgttaaatatgctaattggtttaaagaaggatatgataatggtaaggttaagttacctaaagcaaaagaaagtgtatataatcaaggttacaatgaagaagattttagtataccatatgaaatgaagtctattgaaactaagttaaaaggtgtatatgatgaaggtttagaaaaaagagaagaagagaaaagtagaaatgctacttatggggttggagctggaacagcagctgtagttgctggagtagtatataaaaataaaaaacgtaaaaagatatagatgctagatataccaatgatgacaagtgtataacaaatataattttaagtataaatatttaaaatatagaagggaaggttatatctatgggatttaactttaggaaaagcataaatctaggaggaggactcaaattaaatttaggtaagaagagtgtaggtataagtgctggtgttaaaggtgctagagtgtcagttaattcaaaaggaagaaaatcagctacattgagtatacctggaactggaatatcatatacaaaaactagtacaaagaaacgtaaacctaaataaatatttgatatactaagaaatagactgttacaaatagtctattttttagtatatagatttaaaaagtgacaaaattttgaaatataaactaatttcataaaggaaaatattcttttatgtagaattataatatttaagtaatattataaaatttataggaggatttcattatgaaattaagcaaaacactattggcaatagggatgtctgtttcattattgattgctagttgtccaacatcaaacgctcttagttctattaattcaataaaaggtacaaataagtatgaaacagcaggtttaatagcagataaacaaaattatgatattgcaatacttattaattctgaaaatggattatctgatggattgtcagcaagtggattgtcaggagctaaaaatgccccaatattgttaactaagaaagatacaatcccttcagaaacattaaaaagattagaaaaggtaaaagaagtatatctaattggaggaaaaaattcgataggagcatcagttcagaaaatattaagtgataaaaaaataagcataaatagaataagtggaactgatagaatagatacaagtcataaagttgcaaaagaaataggaagagtaagtacggttaaaaaagtaatattaactaatgcttttaaaggcgaaccagatgctatgagtgttgcttctatagcagttagagataaatctccaatagtattaactgatggaaatactacaagttttgctacagatggattagaaacttatgcaattggtggaaaagtcagtatgagtgataagttaataaatgaaactaaagcaacaagaataggtggagtagatagatacgatacaaataaacaaataataaataaattttataatggctcaaaagaattttacatagcaagtgggactgatttagtttattctttagttggttctacaattgcacaaaaaacacctatagtgttagttggaaatggaagtaataagagtatattaaaaaatgcaagtaaaataactgctattggaaatattgatgatgttattataaaacaatgtttaaatataactaataatgttggggattcaaatacaggtattgtaaaagatactaattcaaataatacaaacaaaccaagtaatgagcctagctctaataatcctggattaactgataaaagtacagtatatgtaactcctaatggaaaatcatatcatctaacaaaaaattgttctacactaaaaagaagtaaaacaataaataaagtaacattaaaacaagctaagtcacaaggtaaaatagacccttgtaatgtttgtgtaaaataatgtattagccaaatatatattaaaaaagacaattaattaagattgtcttttttattgaagaaatataaatttatattatgtattattaaaaagaaaattattaattataaaaaataataataaagacgataagtattaaaattttatgtttccaatatttatgatataattaatatggcaaggaataaatatttgaaaaagctatgagtggtgtttccatggaagtttcttcactttcttatgagaggaggtgaaaactatggaaaatctaatgatgagtattataactggtgttatagccagttacatttacgataaattaaagagccactctgaccaatgaactatacccactgttttatacagttaaaacatgtaaaagtggttataaagtactagtgtcaatcattagtactttttttattatattcatataattaatagctatattttaaagtttactatctaaaaaatagcacgtcaaataaaaccctagatatttaaatttttttagagctacttaaaataaattatgctatctctgtacttaaatatttcctaaattcaagtggagacatagaatttaatctcttttgatatctaaaattattatagtaatatatataatcatctattgctttgactaattgttcgtatgtatcaaatttccttaaatagtacatttccacttttaaaattccccaaaatccttccataggagcattgtcaatacaatgaccaactctcgacatactttgtatcatgccttgtgttaaaagttttgatttaaacaccctgctagtatactgatagcctctatcactatgaaagataggttttgcatttggatatacttctattgctttattaaaagtttcgaatactaagttattgttatttgattttccaataacatatgaaactatgcttctatcacctaaatccagaattgcacttaaataagcctttgtcccgttggttaatttaaattcagttacatctgttaaccatttttgagaagttttatctgcactaaattttctatttaatacattttcagcaattacttctggtgtacatttaacataactaaatttcttttttctacaaatagaccttaagcctacggctctcattagtctgtacactctcttgtgattgacattaagtttatactctctgtttaactgcaaggtcatccttaaagagccaaaaactcccttcttttcttcatatatcttagttatcaaagttgctaatttaatgttttcaagttctaaattacttttatctcgattgagccatttatagtatccagaacgatttactttagcgatttcacataattgtataagcgaagcttttttttcattgaataaggattgaatcgctttatatttatcttcattcttggatagtgtaattaccaccctctttctatgatttttaacttttttaagaattcattctccagttgtaatttgtgtttttctgcttttacaattttcaattccaactttatttcatctaattgagttaactcatcttctttttttgatttacctcttcggtcttctaaagcatctatcccattttctttatatttaagagtccatcttctaacttggctgtatgaaacaaagtatttttttgctattaaattgtaattaagaccatgttcaatacaatctttaacaatttcagctctttcatctaatgttgtttttctagtctccataaagagtcctcccttcggggtttcttttatcaccttatgaagattatactctttaacccaagcttttagtggatgaactgatctcattttatatttttttgagatagtatcataagatccttccccatttagataagattctatagcatttaatttaaactctttagaatagcatgatttgtgactttgttttattaaaccatcatttccaaaagtttcataatttcgcatccactctctgaatgtacgttttccaatatttaattcttccattatttttattactgaattttcaccctttaaatatgattcaattgcttcgattttttgctctgatgatactttagttttagacataacaaaaccctcctagtttcagacagttttacatatttcaactgtctcctaagaggggtatagttcacaactaagagtggctgggaacttaatataaagttccagaaaagtaaatcttcaaaataatttattgaaggaaacatcactcaaagttaagtaaaatatgtttccttgcttttattatatcacaaattaaaaatattaacacaaaattttgtgaatatatacttattattgttctaaaaaaatatgtaaataattgatttgatttcatagaattattgttgtaatatttagttaaatatacacaatctcaattaaagaagataagtattataaattcatatcaaaaaaatacataaacttttaagttataattttataaaaagtcttttagtatcattatttcaagaggaattaacatatgaaaaaataacttcattagaaaagtggataaaaaactggtaagaagatgactaaagattacatatactattacttaaattaaaaatttaatataatttataatgtatacaatttattataaaaaatttaattttaattttctatttttgatactataatatataatcttgataatttaattaaaaatctagattttacataccaaactggtttcttatttcgctatctttacttatgaactcatatattcctataaaggttattttagaaaaagttggttatttaaacattaataccacaatttctatagattgtttgttgaataatctataattatattatggactaaaaaatccaatgagttaatttattgtttttttatatttgagagattacaacttattagtttgtatatctctttttttaataaaatcaataatatataaaactattggcatatttaatgacaattcaaatattgtatataaccataatgaaagatatataaataaaattttaaatatacttaaaaatatattaatataatgtacataaaaaatatcataaatatatgataagataaatacaatagcaatattttattaattttttgggtttttatatatttaggtactggggtgatatagttgaaccaagagatattttttaaaataatgaatgaaatattggaaaatattgatgaaggggtacattttgttaataaagacgggaaaactataatctacaataattctgtacaaaaaatggaaaaaatgaacagacacgatattttagccaattcattttttgatatagtcaacaaaatgaaaataaacaggagtacactattagaagttttggaaaaaagggaagttatcaaagacaatattcaaaaatatctggacaaaaatggaaaagagataacagcaattaatactacaataccaattgatattaaaggcgagtttgtaggggcacttgaaatatcaaagaatatgacaacgatagaaaatttactaaacagaaattataaaaaaaatttagtcaataaagttagtagtagacaaaaaaagggttatgaatttgatgatattttaggggaaagtaatttgattaaagaagcaatagaaaaatctaagaaagcttgcaagtctgatgcttcagtatttatatacggtgaaactggaacgggtaaagagttatttagccagtccattcattatggaagtaataggagaaactatccatttatagcacaaaattgtgcggctttgccggaatcactattcgaaggtatcctttttggaactagcaagggaggatttacaggagcaatagataggccaggcttatttgaacaagctaacaaagggacattgttattggatgagataaattccatgcctattatgttacaggctaaactattaagggttttacaagaaggttatgtaagaagggttggaggaactaaggatatacctatagatgtaagaattattgcaacgacaaatgaaagtccaaaggtaattttaaacgagcataaaatgcgaaaagatttatattataggcttaacataattcatataaaaattcctcctcttagagatagaaaagaggacatacttctattgtgcaaaaaatttatttcaaagtataataaaaagttaaataaaaaagtggtaggaatttcagatgaagctattaaaattttaaaaaattacgattggcaaggtaacataagagagctagaaaacataatttattgtactatgagtatgatggaagatgaggtacaaatagaaacaagtatgattaatctaaacgactattacaatcttaaagagaataaagagagtaacaattattctttaaacgatttggagggcaaaacacttagtaagattatcagtgagatagaagaaaagtatatatatgaatcattagaaaaggcatcgtacaatataactaaagctgcatcaattttaggtatgaataggcaaaatttacagtataaaataaaaaaatataatatcaaaatattataaataagcaagataaaaaaacaaaatagaagtaaaataaaaaagcaaaatataggagcaaaattattataaaagagcaaaatattttgctcttttttttatttctcataagaaatattattttttatttatgaaaatacataataaaataattatagtttcaacgttccaataaatatttactttaattttaaagttggcacgatttatgctttaactaattattgagaatatataaatttttaggagggtgtatatatgagaaaagtaagagtaggaatatggggatttggagctatgggaataggtatggctaatatgattctaaagaaagaaggtatagaaatagtatctgtttgtagtagaagtacttcagggaaaagtatgtatgatgttttaggaattgaaagaggagaaagaccagaagttattatcaataaaaattatgaagaagtttttagagaaaaaagtgtagatgttgttttgttagcaactgattcatttactaaaaaggcttttgataaaataattttcttattaaatagaaaaataaatgttatatcaacagcagaacaaatggcatatccacaagctgatgatgcagatttagctaaaaaaatggatgaagttgcaaaggaaaatggagtaagtatacttggaacaggaataaatccaggatttgtattagatttactagtattggcactttcaggtacttgtgaagaagttactagtataaaagctaagagagtaaatgatttatctccatttggaaaatctgttatggaggaacaaggtgttggagtaacaagggaagaatttataaaaggtgtagaagataagactatagcaggtcatgtaggttttgtagaatcaataaatatgatagctgatggattaggttggaaattagataagatagaacaaacaaaagagccaataatgactacagtagatagaaaatctaaatacggagaggcattggctggaaatgttgctggttgtagacaatgtggatatggatatgtaaatggagacgttttaattgaaatggagcatccacaacagataataccagaagtagaaggtattaaaacaggagactatgtatcaataaaaggtataccaaacattgatttacaaataaatcctgaaatacctggaggagtaggtacttatgcaatgatagtaaactctattccattaataataaatgctagaccaggtcttaaaactatgttggatataccagtgcctagagcaataatgggagacataagaaatcagatagaagttgaattggaagaagaatcaaaggctaattagtaagataacagttagctaattggtaaaataatgtttaatttaaaataacagtaaattaattagtaaggaatagtcaattaataaggggatgaaaaaatggatgctaaaattaatgattgggttattatacacaatatagtattgactccagaagaaagagctccacaagttccagaggatactaagaaagtatccttagaaatgtgggttaaaggttttatacaaagtgatgcttctataggcgacttagtagaagttaaaacaattacaggtagacttgtaaaaggtaatttacttaaagtaaatccatattatactcatgattatggtaaatgtataccagagttactccaaataggaatccaagctaaagaaatattatttggaggtgtatataatgaataattcaacatcaataaaagatatgagttatcaagctgttatgggaagaaataacgaaataatgaaaaatgcaatcggattggattattcttcttttgaacaagagggaatagggtttgattatgagaaaatgatgagtgaaacaggatatacattacaagatattgaagcaattcaatcacagtatgctgttggaaatactcctctaatagagcttaaaaatttgactaaattagctagaaaatgtgctaaagaaggtaaaggagctaaaatatttgtaaaagatgaagcaatgaatgcatctggtagttttaaagcaagaagagcagctactgcagtatatcatgccaaacaaatgggatataaaggtgtaatagcagctaccagtggtaactatggtgcagctgtagcatcacaagcggcaatgcagggattaaaatgtataatagttcaagaatgttatgattctaatggtgtaggtcaacctgaaattatagaaaaagcacgaaaatgtgaggcatatggagcagaagttgttcagttaactgttggaccagagttattttatacgttcttagttttattagaagaaacaggctattttaacgcatcattatattcaccatttggaattgcaggtgtagaaactttaggttatgagttagctatccaatttagagaaaagtataaaaaagaccctgatatagttgtttgtacaaatgcaggtggtggtaatcttactggaactgcaagaggattgataaaagctggttccattaatactaaagtagtaggagcaagtgtagatttaaaaggattacacatggctagtgataatcaatttaataaaaaatcatttacaacaggacatacaggttttgggataccatactgtacatggcctgataggtcagatgtacctaggtctgcagctagaccacttagatatatggatagatatgtattagtaaaacaaggagaagttttttatacaactgaattattggcacagctagaaggtatagaaagaggtccagcaggaaatacatctttagcagcagcattctctttagctcaagagttagatgaggataaagttatagtggtacaagaaacagaatatacaggcgcaggtaaacatatatgtccacagcttacttttgcaagagaaaatggaatagatataaaatttggaaatccaagagaagaaattgcaggagtaaacttaatattaccagaaagaccagaattattgaaatgtgttgatattgatatgaataaaataagaaagtcatttataaaaaattgcatatctaataatcacattgataatattgataagctaagtaatcgagatatagaatttttaatggaagaagtaaaaagttcaagagattttgttgttgatgtattaaataatttatagtaattattgtttttttatttaatataaaataaaaattcggaaaattctattaaatcaatgcgaatggaggaatgttcatgaaaaaaagagaggatgattttgaagttagaagaaaacatcttcaagaactgagtgatgatgagttaaaagaaaggttttggaatttagctacccagatagtagaaccaatgatagaacttggtaaaaagaatacaacaccatcaatagaaaggtctgtcttgttgagaatgggattttcttctcttgaagtaaaacctattttagaaggggttatggaaagaggtcttataggtaaaggagcagggcatgtagtttataaattggctaaatctaaaaatataacggttagagaagcaggtttgttattagttaagggtgaatattgggatgaagttacatgtttatttagagaaggggtagaatcatgttaaaggaaaataaaaaattggatatagactatatattaaaagatttggataaatataaaccaaaacgaagaggttgggtttggagagaacacttggaaaatcttgaaatgggaccttttaaatataaagactgtacaaaacctttaaagaagagtgtagggctaccatcatctaagtatttcaataatatagaccctcaaccaagtccagttattactactgaaatagcttctggtagatttgaggatgatataagaagaatgagaatggcagctcatcatggagctgaccatctaatggttatcagaactgctggacaatcacattttgatgggcttatagaaggaactccacaaggtataggtggagttccaataacaagaaaacaagtaagagctcaaaggaaggctcttgattttatagaagaagaagttggtagacctattaattaccattcatatgtaagtggtgttgctggtcctgaagtagcagtaatgtttgctgaggaaggagtcaatggagcacatcaagacccacaatataatgttctgtataggaatataaacatggtaaggtcttttgtagatgcttgtgaggcaaagaaaataatggcttttgccaatatagctcaaattgatggagcacataatgctaatgctactgctagagaagcatggaaggtaatgcctgaacttatggttcaacacgctttaaactctatattctcagaaaaaataggtatagataaaagtaatatatgcttatcaacagttccaccaacagcacctccagcaccatgtttaagaatagacttaccttacgctgttgcacttagagaattatttagtgattataagatgagagctcaaatgaatactaaatatatggaatcatcaactagagaagcaacagttactcatgtattaaacttattaacatcagtattaactagagctgacatacaatcaactataacacctgatgaaggtagaaatgtaccttggcatatatacaatatagaagcatgtgatacagcaaagcaagctttagttggtatggatgggcttatggatatgatagaacttaaagatgtcggtgaattaagagacaaagcaagagaacttaaagaaagagctgtattatatatggaagaaatatctgaagttggtggatattttgaatctgtggaacaaggattttttgttgattctggaaattatccagaaagaaatggtgatggaatatctagaaaaataaaaggtggagttggtgaaggtactgtttatgaaagagaagaagattatttagcacctgtaactgctcactttggatacaataatgtagctcaatatgatgaaaatgctatagataatccatcaatgttaatagatggatgtacatttgaaaatccagacaaaataatatatattgatgagcttgacgattttgataatgtagaaaatagactaaaagaatcatatgagtacagaaatggaactaaaattaagcctgaaatggaatggtgtgcagatggaattgtaatgataacaatgatgcttcctactgataaaagaacagcagagtttgcagctttggaatttgtcaaaaaaatgaacttacaagaaattgaggtcataagtagagaagttatgcatgaatctgaagggactagaatagaagtgaaaggaagagttccgtttgatatagatttaaacaatttagtaataccagaagaacctaaggtactaactgatgaagaaataagagcagatatagaagaaaaacctatgaaaatagtttcagctacggttggagaagatgaacattcagttggtttaagagaaataatagatataaaacatggaggtattgaaaaatatggcatagaatgccactatctagggacttctgtacctgtagaaaaattggtagatgcagcgattgaactgaatgcagatgcaatacttgcatctacaataataagtcatgatgatattcactataaaaacatgaaaaaattacacgattattgtgtagaaaaaggtataagagataaagtaatgattgcgtgtggaggaacacaagtaacacctgaaatagctgttgaacaaggcatcgatgctggatttggaagaaacagcaaaggcatacatgtagccactttcttagttgaaaaaagaagagaaatgagtaataaataatggaaaatagcaaagtttctttaaaaatagatgtgttggtagctgaaattggaagtactactacagtggtaaacgctttccacgatattaatactaacaatcctatatttttgggtcaaggtcaagctccaacaacagtgtttgaaggtggcgatgtaagaaatggcttatcaggtgctattaaagatttagctaataaattatctgtagatgatatagagtataatgatatgtttgcaacttctagtgcagctggtggattaaaaatgactgttcatggattagtctatgatatgacagtaaaagcagctaaagaagcagctttaggggctggagctgttattcgtcaaataacatcaggtagaattaaaagaactgatttaaataaaataaaagaaataaacccaaacataattttaatagctggtggagtcgattatggagaaagagatacagctatttataatgcagaaatgatagcttctatgaatctaggcataccagttatatatgctggtaatgttgaaaatcaagaggaaataaggttaatatttgaagatactaattataagctttatataactgaaaatgtataccctaaaatagatttattgaatatagaacctacaagaagaatcattcaaagtgtatttgaagaacacataactacagcaccaggaatgaaatacattaaagaaatggttaatgaaaatattactccaaccccaggagctgtaatggaagcttctaaacttttatataaaaatattggagatttattaactttggatgtaggtggagcaactactgatgtacattctgttacagatggaagtgactatattaataaaattttggttaatcctgaacctactgcaaagagaagtgttgagggggatttaggtgtatatgtaaatatgaagaatatagtagaagttataggtaaagaaaacttacaaagtgaactatatatagatattgatgcagtaatagagaattatcctccaataccaaaatcaaaagaagaaatattatttgttgagaggttgacaaaagaagctgttgttaaagctatgctaagacattcaggaaaaataagaaatatctatggaacaactggaaaagtcaaaattgcagaagggaaagatttaacagaagtaagatatatagttggtacagggggagcacttactaggctccctagtagaattgaaatattagataatatgctcaaatacaataaaaataatgaattactatttccaaaggaaaaaacaaagatattaatagataatgactatattatggcatctatgggtgttttatctaaaaaatatgaagaagcatctcttaagctcctgttaaaaagtttgaattttgaggaggaaagattatgtatcctaggttagaaatagatatagaaaagttaaagcataatgcaaaattaatttcgcagatgtgtcatgaaagaagtattaagatatcttttgttactaaatcattttgtgcacaaaaagaaatagtagaagaaatatgtagtgaaggaatagaccatatagcagattcaagaatacaaaacttaaaaaaattacaagatataaatctacctaagatattgattagaatcccaatgttaagtgaattagaagaagttatcaattattgcgatattagttttaactcagaattagaaacaataaagaaattaaatgaattatgtgaaagtaaaaatattattcataagatagttcttatgtttgacttaggcgatttacgagaaggatacttttatgaagaagacttttttaataatgtaagagagatagtaagattaaaaaatattgaaataattggtatagctacaaacttaacctgttatggagctattataccatctagggaaaatataggcagactggtaagtatagcaaaaagaatggaagaaaaatttggaataaatctagaaatagtatctggaggtaattcaagttctattcatctgttgataaataataatatgccagaaggtattactaatttgagaataggcgagtccattctacttggtagagaaacggcatacggtgaaaatataaatggaacatatcaagatgcatttaaattaatatgccaagtagttgaatgtaaagaaaaaccatcagttcctattggagaaataggagttgatgcctttagaaataaacctgtttatgaagataagggaatcttaaaaagggcaatcatagctataggtaaacaagatataaatattgactctttaattccaatagacactgatataaaaatattaggggcaagttcagaccacatgatactagatgtaagtaacacaaaatatgattataaattaggtgacaatttagaatttttattaacttatgggggtatcatgtcatctagtacaagcaaatatgtttcaaaaaaaattatagtgtagtgtttaaataattaggaggaaactattttatgaaagagcgagaatgtagaaaagcaagtctgtttgatgcaatgataccaattacttgtttgatattatttttaagtctaggagtattagtgtatggttcatcacctcatgtaccactaataggagcagcagcagtagcaggacttgtggctgtatatagacttggatttaaatggaaagagttagaattaagtatgtttaatagtataaagatggcaatgcaagcaatcttaatcataattataataggcgtacttataggaacttggatagtaagtggagtagttccatgtatgatttactggggactaaaaattttatcaccaaatatttttttagtagcatcaacattagtctgtgcaatagtatctcttgcgacaggttcatcttggagcacaatgggtacagtaggagtagctcttttaggaattggtcaaagtttaggtatgccaattggattaatcgtaggttctataatatctggagcttactttggagataaactatcacctttatctgaaacgactaacttagctccagcaatggcaggaacagatttgtttacacatataaaatatatgttatattcgactataccatcattattaatttgtttagtaatttatggtgtaattggaatgaagtattcaggtcaagcactagatataaaacaaatagaattaattaggtctacattagattctacatttaatactttatcaccagtattattattagctccagcaatagtaattggattagttgtatttaaagttcctgctataccagggcttatagtaggtgctgtattgggagtattgtttgcagtagtttttcaaggagaatctatgaatacgatattagatgcagcacaaaatggatatgtttcgtcaacacaaatacaggaggtagatgctttattatctaaaggtgggattatgaatatgatgtccactgtatccttaacaatatgcgctttatctcttggaggtattttagaaaaaacaggtatgcttgaagtagtagcatcttctttactaagattagcaaagggtgtatttggaacagtattatgtactatggtaacttgtacaattaccaatataatagcaggtgaacaatatctatctatagttataccaggaagaatgtataataaggaatataaaaagagaggtatacatcctaagatgttgtcgagagctttagaagatagcggaactttaacttctccattagtaccatggaatacatgcggggcgtatataacagcaacattaggtgtatctgcactaacatatggtccatacgctttattaaatattataaatccaatagtatctttagtattaattgcatgtaagtttaaaatagcaagaatagaagatgaacctgaaacttgtttaaattttgatgtttgataatagataacttatgtaagaacgtaggaactagggggggagcctgtggggaattagtaagacatattttagtgtgcgaaattctataaatcagtaatcttgtgactttagccatgggaggttcagattagtaaatttatagttttatattagtctatactttgatcttttaattgtttgtataaattttttatagaaaaagatttcttttagacttgcctaaaaattaggcaagtcttttaagtatgttctgattataagagcactgtgtgacaagaatgatgagattatttttgctatactttcgatataagaaatggaaggaggttatgttttatatttatatgaaataattagttacacagtgaattttcgtataatttggtataaaaagattagaaatgaaaataaagtaatggaggaataaaatgactagaatatccaatataacaatagctgaacaatctgagtactgttttttggcaatacgaaaaacaattgactttatggtagagttttcagagttttcaaaacaaagttttgaaaaaatttctaaatatctggaggagagaggaattttatcttcaggagcaccgattgtatgttttcataacatggatttagcaaaattggatgttgaagtagggtttcctgtagccacttatatagatgggaaaaatgagattctacaaaggattgttcctgcacagaaaataataactgcaattgatttaggaccttatgaattacaagaccctactttagaagacttattttcatgggcaaatagcaatggatataaacttcatggcgatatatattaccagtatttaaatgatatcaatcgtccagctagtgaatatcttacgaaaatgatgttacccattatatagaaagttaaagattatcgtttgttagttgataattagaagaacatttaatgctactgcataaattttatcctaaataatatcaaggtgatttaatttatgtattctaatgtaactgtagataatcaatttataactaacttagtgtaatttagatttaatttattattctaatgtaaccccaatatattgttaaggtctacttaagatgctcaaaaggctatgcttaatttattgttatataatttgtagagtggtataatttagaagtgatactatatagatatatagggggaaaatatgaaaatatatgatatattaacacgtttttatattcaagatatagaaaaagccatacctttttatgagaatcttttaaaagaaaaatgttctttgcgtttttcttataaagaagttgggttggaattagcgcaaataggaaatgttttactattatctggttctgatgatgctcttaaaccatttatagaaacaaaatctacttttatggttgattctgttgatgaatggagaagttatctattggataatggagcagttgtagtaagagataagaaaaaagttcctacaggatataatatgacattgagacatccagatggtacaattatagaatatgttcaacatacaaagcaggattagttaaaaatagattttactactgagcaactaattagaatctattcttagacgtacaatttattatttttggtattaatagattataagtcaaattataatatttcaaaatagaatagaaatttatttacataaaagagagtgtttaaaaatgaactttttagttcacgaagcactcctttttgtatgaaatcaaatacatcaatatataaaacaaactgatgaagagcttaaattaaaataaaaagattcataacaggaccccattaaactttaagatagggtaagtttgtaatcatattaaataattgtaaaaagctgtttttagtcgtataatataaatatttatcatttaattaaggaatctaaaaggaatctaataagaagaaaataataaataactttttagatttactaaatgaaaaattattgaaaattaaaggattagagtctttaatcagaaagtaaaaagtaatatattaaatttatgaattgaaaacttaaacaacaaatttgtttataaaatagcaagattcattaaatataactaagtaataattgatataatgttgcatggataaaaggagggaagctgcaatgtcttacaaagtaattaatgtcataactgctattgactatatagaggagcatttatcagaaaagctggatttagatataattgctaatgctgttcattactcaaaatatcacctgcatagaactttcacaacttctgttggtctaacaatgcatgattacataaagcggagaaagttgacagaagcagcaaaattattggtattttcaaagaaaccaattattgaaattgcattgatagctggatatgaaagtcaacaggcattcacttctatatttaaagctatgtataaaaaatctccaaataaatataggaaagaacaagaattttatcctttgcagctaagatttgttttgaaaaaagataacctattttcaaagaatgtactagagttggaaaaagaaattaaacttgcaagtatgtctgacataccattatggatgaatttagtgagattagtcatagatggatttccaaatttgcaagaggaagaatatatatatcaattagaacagtatattttagaagaaagagctttaatattaaaacttaataatgtcgctattgcaaatatggtgtttaatagagaaactagaagtattgatttttttggaatacatccacagtatcgtaattcagacattgcacaagtgtttttgaagaaagttattgaagatttcttgatagatacagatatctcaattactacctttcgagagggtgacaaagctgatacaggacatagagatatgataaagaagttggggtttgcagaagcagagttgcttgtggaatttggatatcctactcaaaaatttattcttccttgtgtagaagaaagagataatagacaaaattaattgtagattaaatgcaaagtttaccacatattttttgtttgaattattttatatataagagtatttctgcttttaatgtattttgcttgtaagtgtacttatggtaataaatatagaaagatttagttttttaaaaaaagaactttaaagctaaaaagctaacatttaagttaaatagcaagaatgattaaaaactccaaaacacaattaagtataatgattcagtgtaagtacttaattaacaaaggaggatttaaatgtctgaaaataaacaagtagtaaattgcgatattattgcatccaattctaaacataatatgtgtgaacatgatgtagagttattaactttttttccagatgagattgcacatctaatagagataaataacaagctagacaatgcttttaagaaagctgaaaatcttgttgacaagcttgataaggattatatggacgctaaaatgtatatggtaaaaaatcgtggtgaaatagacccacatgaaatgtttcaaaatgaacaaggactaaaacaaatagataactatggggcttttatggtaaaagttcgagataagattaataaaatcaaagattctccatactttgctagaatagattttaggctgaaagatatggatgatgaatctaagtattatattggtagatttgcatttgattatgaagatgagcttataatacttgactggcgttctccaattgccagtatgttttatgattatgaaatcggaaaagctggatatgatgctccaataggatgggtggatggagaaataacaagaaaacgacaatttaaaattaaaaatggaaaattggaatatgcactagaaagttccattaatatacaagatgatattcttcaaaaagaacttagtcacacttcagatgaaaaaatgaagtcaatcatttcaacaatacaaaaggaacaaaatcaaattattagaaatgataaagctgatacactgattattcaaggggtagctggttctgggaaaacatctatagcattacacagaattgcttttcttctttatcgatttaaagataaaatatcagcaaataatgtaattatcctatcacctaataaagtctttggagactatatttccaatgtccttcctgagcttggagaagaaccattatgtgaattaagttttgaaaatatagcagaggtacaattagatagagttattaattttgaaagtgagaaagacccattagaaataaatgatgctaaatggtctgaaagagtgcgttttaaatctacacttgattttgtaaaacttattgatgattatataaaacaaatgccaaataagatttttattccaaaagactacacttttggaagttttacagctaaaagtgactggatacagagtagatttgaggcatataacagatatccagttaagaagagattagaaaaggtagctgaagacattcattataaatttgaatcagataatattatggaagaagatttaccaaaggtaaaaagtatacttaaaagtttgaatggaatgttgacaataaaaaatactcttacactatataaggatttctttaaacaaatgaatatatcaaacatgtttgtgatggcagaaaagaaaacacttgaatggtcagatgtatacccatttatatatattcatgctgcatatgaaggtatacaagaagataagattataaggcatattgttattgatgaaatgcaggactatacacctattcaatatgctgtaataaacttactttttaagtgtaaaaagactattcttggagattttggacaattggttaatcctaatcatactcatacattagatgatatgaaacagctatataatgatggggaactagttatgttgaacaagagttaccgttctacttttgagattattaatttcgccaaaaagattcaagatatatcttcattagagcctattgaacgacatggtgaagaaccggctttattaaaatgtaataacgagcaagatgaaataaataagataaaaatagaaattgaagaatttaaaaagagtgataatgcgactcttggtattatattaaagacagataatgacgctaaagctgtatatgatgcgttaagagaagaatatagtgttcacttaatatcttctgaaagttctagctttacaaaaggagtatccataacttctattaaaatgtcaaaaggtttagagtttgatgaagttattgtaccttcagtaaataataaaacatattatagtgattatgaccgcagtttgttatatattgcttgtacacgagctatgcacaaacttaagttaacatatgttggtacattaactcaacttataagcatgtagattatatcttatatgcatttattatcgtaaatataaattgggacaaagattcatcaataaatcaacaaaaaataatacttataaatttataaaaaatgaaagctataaattacatttgaaattttataaaattttgtgatttatagcttttataatattaatttcttttaaaataaagttaaactttaaatttatgaaataaaacaaagtagtaatatatatgtaatagttcttaattttttaatattagtattatattatctatatatttattgattttctaaggaaatctgatgttatagtgcaacctctttcaaacatttctagtggtgtaccttcaaatacgacctgaccaccgtttttgccaccatcaggaccaatatcaattacccagtctgcttgtttcaatacatccaaattatgttcaattataattacagtattacctttatcaactatatgctcaaaaatcaacataagcttttcaatatcagaaccatgaagccctgtagttggctcatctaaaatatatatagtaccttttttgttgaggtttttagctaacttaattcgttgacgttctcctccagatagtgtgctaagtggttgacctaaggtcatataaggtaaaccaacatctttcattgtttgtaagattttacatagcttcttttctgtaaaaaattcaagagattcatctactgtcatagatagtacatcaactatacatttacctttatataattttgacaaaacttcttcactatatctagtacctttgcaagcttcacatgtattaataatagggtccatgaatacaagctctgtaacaagtactcctttaccatcacaaacaggacaagctccctttgaattaaagctgaataaaccttcttcaacattattttctttagcaaatacttttcttatctcatcaaagaaaccaagaaatgtagcaggcatagaacgatttgtagctgtaactgggctttggtcgattttaataacatctttttcgtatttttgtgcaaaaacacgagagattaaagtactcttgccagaacctgctactccagtaacgacagtcataattccaactggtaaatctacatcaatatgttttagattatttatgcaagcatctctaattggaagggtaccttttggatgacgagagtcagtttttataggtaatgatagattcattgcatttgaagtaagagtgtttgctaaaagtaatttatcataagagccttggaatacaacatgtccaccctgagtaccagcacttgggccaatatctataacttcatctgctatggagataacatctttatcatgctctactacaaggacagtatttcctctatctctaagtttttttaatagctgattcatacgatgtacatctcgtggatgcataccagcactaggttcatcgaaaatataagtcatacctgtgagactgctccccatatagcgtacaagttttaatctttgagcttctcctccagatagagatgatgattctctatttagatgtaggtaagggagaccaatatcaatcattctttttaaaccatcagtaagagtctttattacagtttcagttcttttatcttttatttgtaacaataaatcataaaggtcagtaagttccatattgcacatatctgcaatcgaatatcctaaaatattacagttaagagtttctttatttaatctttttccatgacatacaggacattccttatctgttataagtctttctgatttttcttttgtgtgtttgctcatattgctaatatctcgatttagatatgtttgattgtatttgttaaaaataccctctatttttggattttcttgttttccatctttattttttgaaccataaagcaataaattatattcttcaaaagaataatcttttataggtttatctaaatcaaaaagtccagactctgcatactgcttccagtaccatgaattaggtttaaataaagagtcatttatacatcctgtattccatgaattttcaggatttataatagattcaatattgattactttaactctaccaatcccagaacaatttttacacataccatttgggtcattaaaagaaaaatatgaagttgttcctatgtagggttctccaattctagaaaataataatcttaatgatgaatacaaatcacttatagtgccaactgtagaacgtgcattgccaccaagaggagtttggtctacgattacagaagcagttaaattatcaatcagctccacctgaggttttctatatttaggtagcctatttctgataaatgaagaatatgtttcattcatctgcctttgtgattctgctgcaattgtatcaaatacgatactggattttccagaaccagaaactccagtaaaaacaacaattttatttttaggaattttaaatgatatattttttaggttattttgtgtaagtccttttattataatatttgacatgaatgttaaatcctttctgagtacattttagtaaagcaattatattatgtaaccatattataataaaattaaaatctactttcttgatatattctgctatgttatagaaggtatttctaaatttaaccaatcccatacaatctgaataaatgatagttgataatagataaaaaagtatataatagatactcgtaatttgataagtacaaagataattatacaattaaaacgacttgacatttaaaacttactattgtaatatttaaatattacaatagtaagttttaaatagagaataaataattacctcacaaactgaaaggaggacataatgatactaatagttatattgagtatattcatcatagcctcaatcaacataattatattaggtaaagaaaatataagagatatagttatccctttaactctatttattgtaagtgattttttatttttgtgtggaaatataatatgtaggggaggagtaatgctactatttataggtttatttgcaataccattgatgctaattgcatttatatggatttgtgtacatatgattaagctttactataaaaaagatttaaataaaagaaaaatgattggatgtatatttagtatctttataagtataggtactatatttattcctagtccaagtgaaagttttagatttaaactttatgaaaaagattatagtgtagtagctaaagctattttgaaagtttatgatgaaaaaaagttaagctctgaatctgtcttttatattcaatctgataaaaatgaattggagaagatattttctaaagaagtaataaaaaaaatgaaaaaactaaacagaaatttagatgtagttaaaatttctgggaatagaaatttagtctattttttctttggagctgaattacaatctattgatggtattgtgatttttaaagatttaaaacatgttaaaccaaagttagattttataaatagaagtattcaagctcctagattggagtatattacaaataatgtatattattttaaaggtgaactataaacttatgtagaggagatggtataaagtatgaaaagaaaaaataattttatttggatagttattcttctagttgttgtagctatgggagtatattatgtaggaagaaagcataacaacacaaaacaaaaacatgataagaatcatataaactctgaattaaataaatccaaagttgaaaacaatgataaaaacaaaaaagaaaaaattaatatggttgactatagtgactgttttgaaggtattagtggaggagctattttttataatactaaaaataaagaatataatatatataacaaagaattaattgaaacaagaaggtcaccatgttctacttttaaaatagtttcaactttaattggtttagaaaaaggggtaataaactcaaaagaatcagttatgggatatgatggtacagagtatccaaataaaaattggaataaaaatcttagtttagaagaggcatttaaggagtcttgtgtttggtactacaaaaaattgatagataaagttgatgctaaatctgtccaaaacattttagatgatttaaagtatgggaattgcgatattagcgaatgggaaggagatttaaaaaatggaaagggacatttaaatggattttggttagaatcttcattacaaatatctccaaaagaacaagtgcaaacaatggcaaaaatatttgagggagatacaaactttaaaaaagagcatattaatattttaagagatattatgaaaatagatgtaaatgataaaaacataaatgtatatggaaaaactggaacaggatttgatgaaaaaaataaacgtgtggatgcatggtttgttggtatgctagagcgtgaaggtgacacctattattttgctattaaatcagatgattccaataaagaaattacagggccaaaggtaaaggaaattgcaattaatataattaagaaatattatagtgtaagggaataaacttaattttatttgtaaatattatttacctatagtctgtaatatttattaaataattttactaaattgagtctatatagagcaaaactcctttagtacataaaatacttgctattgattattaaattgaatacctatagatttaaagttaataccttttaaagactatgtaatatattaaaagtataaataaaatatattgcatagtttttgttttatattataattttaaataatgtgcaaaaactaaacaatatttttaatagtaatttatatttgtattcatgtcactataatgtcattttaggttgctaaaatttaaccataaaggagatgattgtatatggaaatattaaaatgtgaaaatctcacaaaaatatatggttcaaatcaaaccagagtgacagcccttaataatgtaaatttatcagttcaaaaaggtgattttgtatccattgtaggagcatctggttctggcaaatctacattgttacatctgcttgggggagtagatagacctacatctggaaagatttatgttgaagatacagaaatatcaagtttaaaggaagaagctcttgcagtttttagacgtagaaaagtaggtcttatttatcaattttataatcttatacctacccttgatgttagaaaaaatatattattacccatgttacttgataaaagaaaggtggatgaggatagattctctgagattgtatctatattgggattatctgatagattaaaccatcttccaagtcaactttcaggtggacaacaacaaagggtatctatagctagaagtttaatctatagaccagctattttattagcagatgagccaactggtaatcttgatagaaaaaattcagaagaaattgtagacttgttaaacttatcaaataaacgatttaatcagacaatacttcttattactcatgatgagaaaatagcactagaggcaaatcgtattgtaactatggaagatggagtgattgtctctgaaaaggtggtgaagaaatgaatattcttcaagaatacaccttagactttgtacgacgcaataaacgtagtagtatagctataatgttagctatattacttactacaaccatgatgtcttctttgtgtggactgttgtataccatgtggacagattttataagactttcaattgagaaagaaggtaactggcatggtgaattgtttgactatacttatggaagtgacttaccattaattgaaaatttttcttcagttgatgatgtaatggtaaaaggacaatggtatgtaggcaaaattaatgatgagaaaagagattatataatttatagaaatgctacatcagagtattggaattctatgccagaaaaggatactataatagagggtcgtcgaccaaataatgctaatgaaattgcattatcaaaacaatattttgagaataatccaagtgtaaaaattggggataaaattactcttccaataggagatagaatcctaaatggaaagcctcttgaacccatagctcaaaaatcgaaaggggaaagttttaaaaaaatttcagagactacattgacaatagtaggaaaggtagatgtttccacttcatcagtaatacctgcatatacagctcttggatatcttgatagaacaagtataaaacctaatgatagtataactgtgtacttgcgatttaaaaatataagagacacatacaaggaacttccaaaacttgctaaatcattggggtggaagactaatgaatatggaaaatacaatcttaaatataatagtaattatcttttaaaaatgttagtcttttccccagaacagaaagcatctatgagcagtatatcaaaattttcaactcctattatgtatcttacaatagcaatttttacagtagctgtgtttgtaatggtgatttacaacgcgttttcactatctgcaaatgctagacttactcaattagggatattatctagtgttggtgcatcaccaaaacagattaaaatgtctgtagtgtttgaaggttttttgcttacaattataccattgccaataggtttatttttaggatggttattgtgtaataggcttatagtttatattaattcagttaattatcatactgatgttccagaagtggtatttacttatggtattcctgcttttctgccagcagttttacttacaatagtaacagtctggatttctgcacttataccagcacgaaaagtatcaaagatatctcctatagaagcaatacgacaaggagatagtgttaaaatcaaaaagtcgcataaatattcattaggaaagatatttggaatagaaggagaacttgcatcaaacgcactacgtgctcgtaaaaaatcttatcgtactgcaacaatatctttaacattatcttttttattacttacatgttttttgcatataattgcaaatcaagaaggagcaaaagctgtttatggaagtgataattataaggaccaaagagatatagcagtttatttggaaaatagtgaacctgtagagtctgctttcattgaaaaattagataatacagaaggtgtaaaaagttcactatattatcaaaaaatgtctgcttccacttggctgactgaaaaagatgcatcaaaagaacttgcgaaaaatggaggatttaaaagtatagtttcatctaaaaaatactctcctatagaacgtgatggcaagtttcgtataatttcaaatataattgggcttgatgataagagttttacagaatattgtaggcaaatttctgtagacccaaagttattttatgatacaaaaaatccaacctcaattgtatataataaggaggaagatattaatcgtagtacacgtagaaataaagtatatatagattatttaaatctttcaataggagataacattaaattaaatgaaaaagtatatgacgaagataaaggggattatacttacaacatgaaagtgggagctattacaagcacacttcctaaaacagtagatactagttcaaaatatacattaatgcaaatagtgccaatgtctatggtgcaggaaatatctaaaaattatgatgaagtaagtaggttacgttcaaataggctgataggagtatttaaagtaaataatcgtgaggacattcctagagtaagagaaaaattagagtccatttataataaagactatggttcaggagattatagtattgaggatgttttagaaagtgaaaaacaaaaggctagtggaataaagaccatgaatttaatagtaggctttattacaggtttattggctatgattggattatcaaatgtacttgctacagtgtcaggaaatactagaagtagacgacaagagtttgctatgttgcgttctgttggattatctccagaaggcataaaaaagatgcttgttttggaaggtttgttcttaggaattacaccattactacttagtattcctgtgcaaataggaatagtgtatgcttttctacgtataaatgaaatatattttatagagtatttaccatttgcacctatatctacaataataggttttactatattgatactttttattgtaatagcatcatatatgacaggatacaagcagttgaagaatgaaaatatagtagaatctataaaaaatgaaacaatataaacaaaagctatttgaacttatttaaaggtttcgatttaagactacttacaagtatagggatagttaatttgtttgtttaataaaaccttaaatgtaaatagaagtatattactaaaacaatagataacatagaatatagatatagctggattataggtattttacctataatccagcattttatgtgtaaaatttaattatgaatcttgcaccaccattatggcaattttctgcatgtagagtaccattttgacgttctataatagactttgatagagcaagccctataccaatactgtccttactagcatttttaccacgataaaatctattaaaaatatatggaagttcttcctgagcaaaccctttaccattatcttctatgataatctcaacatatagaggattttgactataataagcaactatatatccaccatcttctatatgctcactacaatttttaagaatatttaaaagagcttctaaagtccaattaatatcgatttcaaattctaccgaaggagaagcctcgatagtaaatgtctgatgtttttctcttaaagaaccttctataggctcaattgcataagtaagaagagaatgtacatctataagtttgctttcaaatattaaagtacttgcatccaattttgataatgtaagtaaagatgaaactagtctctcaagtcttgagatttgatttgtaagtctgttaatataatctatttcttcatctggacaattttctgaaagtaattgtgccataagtgacatagaagtaattggagtcttaagttgatgagcaatatctgcaagattatctgaaagagtttgtctttcttttaaagcaaattcttttgaacaacgaagttccccaactgttttatatatctcatcttcaaggtgagaaaattcatcttcacatcgtaaaagtacagactcttttcctaaattcacttcttctaagtattgagtaagattgtttattctactcagtttttgcttatttgttctatgtttgattatatatacaactgtagccattgttgaaattataccaaacgatatcactagaaaataaaaaaagtttttactccaaaatgtacttttagaatatccatgttttgataaaatttcatttcctgttttaaaatccttatcactagaatttttcagtgattttagtatactttctgtagacttaggattgtactcatatgatgcaccaagagccttagacagtacattgtattcattaaaagaagttatagttgttagaattacacttaataaaaaagttataattaagcagaatattataaaaacaactgtactgttgatatttcttggagttttcactagctgtcctccattctatatcctatgcctcttaatgtttttatacaaggtggattttttaatttttctctaagacgctttattgtaacagtaagagtgttatcatttacgaaattaccatctacatcccagagcatttctagtaactttgtacgggtcatagctctatttttattttccataagacttagaagaagtttatattctcctgctgtcaaaagtacttcaacattatctaaatatgctttgacttcaactttattcaagcttatatttccacatgtaatagtattgttagtatttgaatgagttcttctaagaactgcattaattctggattgaagtactgagagcagaaatggtttaaccacatagtcatctgcacccatatctaatccacgtataatgtctttttcatcatcacggactgtcaaaaatatcactggagtatcttctatacttttaacatattggcaaaactcgtatccaataccatcaggtagatttaaatcaagcagaattaaatcaatagttttatcaaaattttttttagcttcagcaatcgtattataacaacatacagtgtgatttttcttttcaagggaagtttttattccaaatgtaattgtatcatcatcttctaaaagaagtattttagccatttacttttagtcctttcagtaatttagttatttcattaactaagttattagttttatgtttaatattttttatgttagagatagaagttagagatagaaaaaattatcatttaagtatataaactttaatttataaacttaggtttatgctttaattgaatctattaaaagagcaagagttgtttcaataaatttttcctcatctatattaaagttgttcaggtatgactttcctgttacagatagtaaattaaaaaatcctgtaagtgtaaatattgatgaatacatgagagtaggtatttcaatatcatgcctaatacttctatcattttttccaatttcaaacattccttgtatttcatcaaacataaatttattaaaagaaaaaaacttttctttaaacagcatatcagtatccgatttttcagagtttacaataccaatcattcccataaggcataatagagaaggttctacagagtaaaatttatgaaaagcaaagtatgaaagttttattttttcaaaccctgttttgccttttgcactttctattttaacattatcccaaagtcttttatatcctcttaagacaacagcaaagaataaatcttctttacatgaaaagtacttgtatatggtgcgtttagtatattcaacttcttttgccaactcattcatagttgtattctgaacctcccatgactaaagtcacagggttcctgcttcatagaattttgcatactaaaatatgtcttactaattctccacaggccatccccgtagttcctacggttcttacataagttatttattttgaatcgttattagtcttaatccttcttttaatatatttatacttgcatttatatctctatcgtgagtttcattacaactaggacaaatccattctcttatatttaagttcttaacttcctcgtttttatacccacatttattgcatatttgtgaacttgcaaagaatttacctactttatacaatttgtctaccataccaattagccttgtattctaattgacgaataaattctgaccatgatacatcagaaattaagcgagatagtttatgatttttaatcatattctttacttgtaaatcttctatgcaaataatatcattctcttttattaatttagtagataatttttgtagaaaatcatttctttgattagctatatgttcttgaagtcttgcaacttttaatcttgctttatttctatttaaactaccgattgtctttctcgataattctctttgtaatttagcaagtttgtttaatgacttcttaagatacttaggattttctataaattctccacaacttgagatacaaaattctttgattcctaaatctaaacctgtctgattgttagtattttcaaatacttcaatatctacatcagtacagcataatgatacataatatctaccacttggttctttagatatagtagcattaagtattctaccttgaggtacttgtttatcccttatcttaaccataccaagtttaggtagttttatatgttgaccacaatacataatgttcccatttgtaaagttagttttatatgaaaatctattaattttctttgatttaaatttaggaaatcctgccttttctttaaagaatttttcatatgcgttttctaaatcttttaaggcgttttgtagtgaaaatttgtcaggttctttaagccactttaattctttttttaagttggtcaaatcagaactacactgtttataagtaaaagtttctttatcgtttttataaacttctattcttttagcaagatacttattatatacaaatctacaacatccaaaagttttgttaattaactcttgttgttttttatttggatacattctaaacttataagctttttccactactaccacctcactttacttgttttttctgattattaatatattttcttatctgctcctctgtattttctgatacagtagcaacgaaataactaggattccaaagatgtctccccataatacggatgtctgtatttgacatactatatgcatatcctctaccatgagtaacttccatttttcatcacctatcataatattaaaatatgcaattacttaaaacaagtattttgaaggttttttatatttatttttaaataacatatataagaaccgtaagtcttaacttttatcatttttgaggttgtcgttcacataagttcgctactacctatgcagttctcttatgaacttcttacactttcatgcaagcacagactatatcttatccttcggcattatccgttaaggtctacccacttccactaccaatagcttgtagtgtacttccctcaagaggaatagtcgttgaagtttctcctattcggagcttacctgctgattgcccattttaaagtacttaggatttaaccttataccatctaaccaattttttctactttcgtaactttcacacttaggtttatttcatccttatgttttagtttggttagctttaggggtttccagcaattcaagtagtattggataggtgttatcctatctctacatataggtttccctatatgctgactattttagctactaactcatgactaaagtcacgagtgtgcgtagctattttttaatcaaatccattaagacaaaataatttttctgccttatcaataatctcattttctctttgtattttttctttatctctttttgataattctgacatataaattattcctttctattgataaaaaagtatactgatggtatacttatgtaaatataatatttgtatacctatagtatactttaataaaaaataaaattaatatcaagtattataactatttataactttattaattaattatataggtaaaataccaaataaggggaatttatttatgaagataaaagaaaatgtattaatgttagatagtactcgtggttcaaattgttttattgtgttcgataaagaaattattcttatagacacaggtcttccttttatggggaaaaatataattaaagaattaaaaacacttggcattaaacttacagatattaagcatattttattaactcatcatgatgttgatcatatatctaatattaaattattgaaagagaaaacaggagcaaaggtatgggctcatgtagaggatataccttttattataggagagaaggatagacctgggtttaagaagtttattggaaaggcaatttccagaaggctcattaaggatgttgaaccttatggagagaatatgaagattgggaatataaaaattatccatactcctggtcatactccagggcatgtctgcatgatttttgaagatgtattatttgcaggtgatttagtcaaaaataagaatggaaatatagttccttatcctaatccatggaattgggattataaaaagatgatgaaatctataagagaattggataatttaaaatatgaatggatatgtatgtctcatggaactccttgtattaaataataaaaattaacatggattaatagaggcatagttgcttgtatgtatgataataatttacagcttctttttaatatatcatgtatatttgtagctgtaagcatatttataacaatacttataattttgtattttaacatctataataatagttttagctttgttaactatgaaatttacttaaagaagtaaatattcaagtaatagtaattattaaataagataaaaaataaatggcagatgaattaaagtaatttctaccatggaaaatacttttgagttagaaaaaactctattttagagtatgaagagatgaagcttccgaagaaagcaatatctaaagtacatgttcgaaaggataagtactttttggtgcctgcttttagcaggttatttttattttaataaaaataaaatcaaatgattattttatccttattatttaagactcttcactagaaaaagcaactaatgtatattaaaataatatttagggagtggaaaaaatgagattagaatcgttagttaaccaaagttataatagtttaaatgaaaatgataaaattattattaaacaaatattgatttgtcaaagagaataccgtaatttttcgtgtgaaaaaattgcaaatgaatgtaatgtttctagagctactttattaaggctttgtagaaaaattggattagattcattctctgatttaaagtatttacttaaaaataatcaactagaatttgttaataatgataataattttcatgatgtttgcgagaattatcgactattaatgaatgaattacaaaaaatatcatttcaagatatttgtaaaataatatatgatgcagaaacaatttatatttatgggacaggtaatgaacagaaaagtttagctcaagaaataaagagaatatttctttcagtaggtaaatgtgttattgacttatttgatataggtgaaattgaatttatgagagaatcatttcaaaaaagtgatttatttattatcatttctttgtctggagaaacaaaatcaggaattgaaattgcaaaatttatcaacaatcatatacatacgatttctttaactaggcttgataataatacaattgcaacactttgtgagtataatctgtatgttgaaactcaaaaacttgatacattacaagctatatcttatgaagtcgtaggagcattttatgctctattagatttgcttcatatgaattacatagagtatagaaggagaaaagaatgaaaattgaaggacttttcaataaatattataattcatttacagcaaatgataagtatatctgtgagtgtattcttaatcataaagaagattgtattaaactttctatagatgaatttgcagacaaataccatatatctacaagtgcactttctcgttttgctcaaaaactacaattacctggatatagtgaattaagagttattatacgcttaaatgaaacagaagtagaatataaaaatcaaagtaaacaccaattaatggattgttataataaggtgatagatgatatagagaagaaggattgttcgattatgtttgaaagaatgaaaaaggcaaatcgtataatcgtctttggagaaggttattctcaggaaagagttgttaaagagatgaaaaggattttcttaccaacagggaaaattatatatgatgtttatggttatgatatgattcaggcgcttaatcattttataaaaacagatgatatgattttctttatctcattgaatggagatacatctacaattattgattttgctaaagaaatgagaatgaaaggaacttatatggtttctattacaaaaatgataagtaatcctttagcaagattatgtgatgaaaacctgtatattcaatctatatctatttctgtagataaacaactggactacgatgtaacaacaccttattttattttaattgaactgctttatattaaatacaagatgtatttagaaagtgaacatattccccgaaagtgaaaatttgtgctaaaaatgaacatattttttaaaagatatcaaaatattgatatctttttttttgaatgctattatgattttgatagtaagaaaggaagatgaaattgtacaaattattaatacttgatatagatggtacgcttagggatgaggtatatggaatcccagaatctgcaaagcacgctatacgtttatgtcaaaagaatcattgcagtgttgttatttgtactggaagaagtataggtacaatacaagatgatgttttatcattaggggttgatggatatattgcaggaggaggtaattacattcaatatcatggtgaattactttataatcaatcttttaatcaaagattgataaaggaagttgtttgtttgttaaaaaagagagaagttgctttttcgattgagagtcaggaaaaagttttcatgaatcaaaaagccaaagaaatatttgaaacaatgaatcagttgaaaggaactaattcttgtataaataaacaacatatccaagaaaaaataacatatgaaaataatattgaagagtataagtcacaagatgtacataaaatttgtttatggtcaaatgaaaaggtatttgacgaagtgaaagatatactacaagataaaatggaattagcacagagagatatttctagtcagtattatgaaattattcaaaaagattttcataagggcaaagcaattaagagattacaagaaagattaggggtaactcaaaaagaaaccatatgttttggtgatggtcaaaatgatattgtcatgtttcaagcatcagacgttacaattgcaatgaaaaatagtcatcaacaacttaaagatatagcgacatctatatgtgaggacatattcgataatggaatttataaagaattaaaaagaagaaatatcatataaaaaggagtaatttatggaaaagaaatggtggcaaaaagaaatcgtttatcaaatttatccaagaagctttcaagatagtaataatgatggaattggagatttacagggaattatttctcgtttagattatttaaaagatttaggtattacatcattgtggttatgtccaatttttaaatcacctatggacgataatgggtatgatattagtgattatttagatattgcaagtgaatttggaagtatggaagatttaaaagagttaattaaagaaagtaaagatagaggaatcaaaattatattagatttagttcttaatcatacaagtgatgaacatccttggtttcaagaagcattaaaaaatccagaaagtccttatcatgattattatatttttaaaaaaggaaacgatttaccaaataactggaggtctgtttttggtggaagtgtttgggaaaaggtagagaatagagacgaatattattttcattcttttggtaaaaaacaacctgaccttaattgggaaaatccaatattaagaagtgaactttaccaaatgattaatacctggtctcaaatgggagtggcaggatttagagttgatgctattacatttatcaaaaagaatttaagttttcaaagtttagaaagtgatggtgttgatggtcttgttaaatgtacaaaaacagttagaaatcagcctggaatagaaaaaatgctttatgaattaaaagaaaatacgtttaaaaaatatgattgtatgactgttgctgaagcagcaggtattagctatgaccaactaggtgattttattggagaagatggtttcttttcaatggtctttgactttaaacatgctgacttagatgttgcttctggtagtgagtggtttaaaagaatttcatggacaattccagatttaagaaaatgcattttagatagccaaatgtatgttcaggaacatggatgggcagctaattttattgaaaatcatgaccaaccaagagctacaacaaagtatcttttgcaatacgaaaggaatgatgatgcagtaaaaatgttgggagcaatgtatttctttttaagaggaacaccatttatttatcagggacaggaattaggaatgacaaattttaaaagagataccataaatgattttaatgatttatctagcattgaccaatactatcgttcaatagatgaaggttactcagaagaagaagcgttagaatttgtgaatttaagaagccgagataatgcaagaacgccatttccatgggcagataaagaaaatgcaggtttttcagatgcaacaccatggttaaaggttattgaaaattataaagatattaatgcacagagtcagattaacaattcagaaagtattttagaattttataaaaagatgataaagttgagacaagatagtaagtattctgattgtttgatttatggttcaatagaacctattgatatagaaagtgacaatgttattgcgtatagaaggcaattagatttggtagttattgattgttattataatttttctgataaacttgtagaaataaaaacagaagaaaaatatgatattgtattccaaaatttagatgatataaatctactaaataaaacagtgagtttgaaaccatttcaagcagtattattgaaagtgaggtagaaaaatgaataaatataataaaatagcaaatgagcttattgaaattattggtgaaaataatattatttctattacacattgtgccacaagattaagggtgatggttaaagatagagaaattattaatgataagaaagtggaaaaggttaatgaggttaaaggtgttttctttacttctggacagtatcaaattattctaggaacgggaatagtcaataaagtttatgcagaagttgaaaaaatgggattgaaaactttatcaaaaaaagaacaagatgaattagttaaaaataatgaaactggatttaagaaagttatgagaactctagcagatatatttgttcctattattccagttattgcggcaacaggattattcttgggattaaagggttgtttgtttaatgataatgtacttggattatttggaatgtcttctgcaaatattccattgtatattcagacacttgtttcggttcttacagaaacagcatttgcttttttaccagcaattattgtatggtcagcatttaaggtatttggaggaacacctgttattggacttgttattggacttatgttagtttctccaatacttcctaatgcatattctgttgctgacccatcaaatgaagttgaagcaattatggcatttggatttattcctattgtaggctgtcaaggaagtgttttaacagctattgttacagcatttattggagctaatcttgaaaaatggttccgtaaacatatgcctaatgtattagaccttattttcacaccattctttgttatgctaataacaatgttagttattttgttaggtgtagggcctataatgcatacaatagaattaaaaatggttgatatcatcagtttattgattggtttacctttaggaattggaggatttattattggatttacatatccattagctgttattactggcttacatcatacttatgtaatgattgaaacatcactattagcaaatacaggatttaatgcacttattactctttgtgcaatgtatggatttgcgaatattggaacatgtctagcatttatgaaaaaatctaaaaataatcaagttaaacaaactgcagttggagcaatgctatctcaactttttggtataagtgagcctgttttatttgggattcagcttcgatataatttaaagcctttgattattatgtgtgcatcttcaggtttaggagcagcaatattatcaattttacatattcaatctaattcatatggattagcagttttaccttcttatttaatgtatatctatgatggatataatttaatcacatacttattagtatcaatatttgtggttgcattctgctttattgtaacatgtttatttggagtgcctaaagaagctataaatgaagatgaagacgaagaattagtgtttaatgaaaataatgaaaactttgtgtctccagctaaggggaaaattgttgcattagaaaatgtaccagatgaaacattttctaaaaaaatgttaggtgatggttttgctattgatattatagatggaaaaattgtttctcctatttcaggtaaattagaaacagtattttcaagtggacatgcatttgggattaaaggaactaatggagaagtattaattcatgttggaattgatacagttgcattaaatggagatggctttgatattgctgttaaacaaggagatatggttaaacagggagatgttcttgttaatgttgatttaaagagaatacatgaattaggaaagtctactttgacaatggtattgtttccagatggtaagaaggtaaatattttggatataaacaaggatgtaaaaataggtcaaagaatatgtgttgagtagtaggtgatatgtaatgactacaaaagaagattatcaagagtaattcaatctttttaaagtatgagaaataattcataaactctaaaacaattaaagaggttgtctcaaaatagagattgtactgcacccaaattgttgaaatgatgaaaatatatttaacttcatacaaaaaattaaatagtggcaacaattgaggatgtgagggagagttgccactatttgtatagggtattatattatgtttttaagctagttttactatcttctatgtttatataataagccttgtatatgaatttaatcgataattaatatgaaaattatgtgaattttttagaatgtacagtaaatatattaaggattatagatttttttgtcatttaatatggataatgttatcttagatgctgaactaccattagaataatctttgctttgaatatttgtagcaaagaaataagtattttcatttttttccacataacctataaaccaaccatttacatcttttccatttatattagcagtgcctgttttaccaaaaagtgataccccatccttttttgatattaacaatgaatcttttactgtttctatatttttatcttcaaatttaaacttatttgtataaaaactttcaagtaattctacctgttcaataggtgatatttttaatgaagattctagccaaaagtttgagataccacctgaaacatcataattgccatatccaatttgcttaagataagtttgtatgttttttagccctgtttttttgtctagagtctgaaagtaccagtttacggagttttccatagcagaaaataagtcttggtcttcattccaagaactattagaatgatgctttccatcccaagggatatgtgaattatttcttgttattatcccattttccaatcccaataaggcactataaatcttataagtagaatttggagaaattcttgttttacttttttctttattgtaaatatgatattgcttggattttaaatcatacataacaaaacttccatcaaaacctttaaaatactgacttaagtcctcgtacacagtttgttcatttgtaggtctatatttttcgttgatatctgccataatagatagtttgggaatatttccaaatacaattaaagctatcaatgtaaaaattaaaatgcttttgaattttaacgtatttgattcattatgaaaatccattatcttcaatagtcgcttttttatttgtttttttgacccaccaatatctgatgtaagtgtaagatttgatggtcttgaaatattatccacaaagtttattagagtttgtccatattctatatgactatctttatcaagcttttttaaaactgaaatatcacatgcaatttcacggtctatacgcatttctttaaatgcataccatacaagaggattaaaccaatataatatttgaaggaagcacattatataatttatcagtatatctttatttttaaagtgttgtaattcatgaagtaagatatattttatatcttttaaagataatttagatatagacttatctggtaatataatgtgtggtttaaagtatccaaatgtaataggtgtatttataataggtgatttgcatagtataaaatccttatttataccaatatcttttttacacttttcaaatataaatactatctcctcatctcttaaaatttgtattgattttttcatattttttattttaatattgcaatgaatagtaatagctatcatgattaaaattccaattatccatgatattagtaataaaatatttaaactatcaaaattaacttggtttagggatactgaaaaatcgtttaatgcatttgagttattaattatagaatttggactattttttataatagaagtcctattagtactgcttccaagttgattaaaagtatataaatagttaaatacatttccaagattaatatatttaagagggacaaatggaattattaacattataagcaatataaatccaatattgtattggtactttgcagaaatatgttttttaaatacttttttggcaagtaaaattataacaattaatattgataaggttaatgtactgagtaaaaatcgtataaagaatggggcatacatatttatttatcccccttagtcgtccttttatttaagatttctctcagttcctcaatatcatcttcagatagtttatcattttctaaaaagtttagtaccatagaattaagagtaccattataaaaacgatttaaaaaagaactactttctgtagctacgtattcttcttctttaacaagtggagtataaacgaatactctgctatttttttcatatgttaaagctccttttttaactaatctcaataacattgtttgaattgttttaggactccatgtacttgtttctaccaacttttcaattacttcagtagtgctgataggagcatatttccaaataattttcataacttgatattctgcttctgaaatatgtggtaactttttcatactatacctccttctacttacatttgtaatacataaagtatattatcattaatttagtttgtcaattattaaaaataattcatttatagttgattaaataagcacatgtagttaaataaaacttttatttaagctgtgtaagtatagctttaaataaatggtttatattgacagctaaaaatatagttgatatacttattgttgatataacaactaaaaaggagatatagaaatgataattacagttataaatggaagccctagaaaaaatggagctacatcaaaagttttaacttacttgtataaagatatagaaagattaataccagatgtaaaaattaattattttgatttaagtgaggtaaatccatcatattgtattggttgtttaaattgttataaaatgggcaagtgtatcaatcaaaatgataaagtagagtatattcatgatataattactaagagtgatggtgttatatttggtagcccaacttatggaagtagtgtaactggacttttcaaggtgtttacagatagagcacatatgatgcttgaaagattattgtatcgtaagccatgtatagcagttactacatatgaaaatgcacgtggttcaaaagcaatttcttttataaaatccatggtcttagattcgggaggttatgtttgtggtagtttatctataaaaactggatttaatcaaaatcctataactgaaaaagtagaatcaaagatacaaaaggtatctaaaaaatttatttattgcatagaggaaaagaaaaatccacctgtgctttctcaaatctataattttattgctataaatgctgttttaaagccaatggcttttaaagatattgagcaatataagggaataattgatagatgggaggagcaggggattatttaaatggaggtaaaatgaaagattttgagaaactatatgaagctacaactaagttagtaagtacttcgttaaaagtaaaagatgatttaaaaaagatgtttaaacaaaatggatatgatataacaactgaccattatgcgttattaaggtttctatgggagcaagatggaatttctcagatagatttatgtgaaaaatcatgtaaggataaatctaatacaacaagaattttagacgttatgaaaaataagggattaattgtccgtaaagtagatgttaaagatagacgtaagtttcaaatattcctaacagatttaggtagagaattagaagaaccattaaatgaaattgcaagtatatatgcaacagagacatttaaatctatctctgatgaagaattgcctttgtttactgatattttggatagaattggaaagtaaatataaatcctattttaagagactttttaactattgatgatgtagaaatatagaaagagggataagaatgaatagtaagatttattatttttctggaacaggaaattcgctagtagtttcaaagattttaaaagaaacgttaaatggaagtaaagaagttatacctttagctatacatagaaaagaaaataatatagacataaatgaagatatattggtaattgtttttcctgtttattttgctgatgttcctgatataataaagtcttttgtagagaaattaaattttaatattaatactcatatatatgccattgccacttgtaatggggtagctggacatagtttatttactatagataagttacttaaaaaaagggggaaaaaattatctgctggttttttaatcaatatgcctggaaatgctttgataacaccttcagatgttgaagaagaaagattgaaaaatcagactaatagggtagctgagattgcaaaatgtatcaataacttggagattggaaatatagaaggaaaaaacaatttaaagtcacatatagatagtgttgtacttcgtttagtaggtaagaatatgcaaattgcaactactaaattttttgcagaaaataaatgtaatggatgtgggacatgtaaaagggtttgtcctgtagagaatataagtatagttgataaaaagccaaagtggggtaatgagtgtgaaagatgcctagcttgttttcactggtgtccaaaagaggctattaatgtaaaaaaatcttttttaacgaataggaagaagtatcaccatccagatattactgtaaaagatatatttttagataaatagatatatttgacttgtattaataattgttttattaaataaaaacgttagagatataaaagaaatataaagtaatcttgtaaagagtaatgttacctagactaaatggaatagagattaaaaagaacaatataaataataaattatgttaatagtatatagttacactaatataaaataaaagtgcctcataaatagaagtttttgaggcacttattatttggctaaattagtttttattattttgtaatatcaaccgtttataatctcgaacattttttttatatcttctgatgccatttcaaattttgatttttcaatcagtatgtttccaccagtcataatatatgatggaaatactcttaaattatcataataaagttcattattacgaagtttatatgttgaaatggaagggatgacattcttttttatatgctttttagtaatcatattaaaagatttttttgcaacatctcccattaacattactacctctaggtttttaaataatttaatttcttcttctaaaataggcatatgtaatttaattgtatcacgagttattgtatattctgatttaggaagttttactgcattagttatatagatacccatatctaggatatcatttatgttagatacttctattcctgcactgtcaaataaaggaatagtagtttttaaataatcagcatctttatctacactataaaaatcgtcattggtgttagttgggacaacctcattaatcattatagtttttattttgtctgtttctattgttatattaggaaggtaggatattattctgttgtcatcaaaaagattgttctgtttaataaattcacttaactttgattttatatttattttcatataacgagtctccttagttttaagctttaaattactataaaaagctagttttaaagcacacaattttgaaaatatagtagcatatttgaaagtataataacatataaaacatgacaacagaatgtcatgttttataaataatctatcgcaacttagaatttattagagactctgcctgttcataatcgtctttatgaacataaattaagtactcataagagaaatcttccttttgacctaaattgccaagtgttatttcattagaaaaaggttttttagagtaagcattatttttcactttatacttatatttaattttatttactgataatatattgcatatctcgttaaatctatttaaagaatatcctcggaaaagctcagttctatttaaaatcataaggaaaacctccttttaaaagtaatatattgaaaagcataggagaaatgtactataagttgttataaataaaaggtagcaaatttaaattgatttgtaaagtttttaagagtattatattagtgataaaataaataatttttataatctaactaataacaatttaaaataggtaacttatgtaagaatcgtagggactacggagatatcctgtagagaattaataagacatatttaagtatgcaaaattctattaagtaggaaccttgtaactttagtcatgtgagatttataaggatatttaagtattgaaaggagagtttaattgaaaaaaatatctcaagaaaaaataagtacacatatccaagaagtaccacaggaaaaaattgaacagtggaaatctttatatgaaaaatataaaagtattttaaaagtaaattctaagtctgttttagaaataatagagtttttaaagcgaaaatatgtaatagtagaagaaacttcagaggaatttaaacatgtagttatcaataatattaagttaaacaagcctttttcacaaaagatttccagtgataaagaattaaaacctattgtatttacaattccaaatgaaggaaatgcaaaaaaattgtacgatactcaagaggaaacttatagtggctgtaagattattgtaggtatggaatttgaaacaggttgtgtttttgtagaaggtagtgatgagcttaatgatgaaataacttcttttaaaggattagataaatatgatataagtaattattatttagtagcaaactatattagatgtctaaagaaatataaattaatagattagtgtttgattaataaattagtgcttgatttaaggattatagagtaaatttgaagttagtgtgataatgaaactaagcttaaatctaatataactgtaaaacataaacttaaatagagttgccaaaataaaattggtaactctattttttattttaatttttattaaaattagtaggtgttatagaattgttattttttcatgttagtattctcttagtaatagatttaaggtattacaagaagggagaaattaatatgaaagatttaattcttgaaacaaaaaacttatcaaaaagatatggagaacaaatggcagttaacaatgtttctctacaaattgaacgaaatagtatatatggacttttaggaccaaatggagcaggaaagtccacaacacttaaaatgcttgttggtcttcttcgcccaacagatggtcgtattatttttgatagaaagccttggaaacgagaatctcttgcaaaaataggttctttaatagaatcccctgcattgtatggaaaccttacagcagaggaaaatttgttagtacatacaaaaatattgggaatacctaaagataaaatttatgaagtgttggaaatagtaaatttgaaaaatacaggtaaaaagagagcttcacaattttctatgggtatgaaacaaaggttaggaatagctattgcacttttgagtgacccagagttgttaatactagatgaaccaaccaatggtcttgacccctttggcattcaagaattgcgtgaattgattgcttcttttccaaaaaaaggtataactgtaattctttctagccatattctatcagaggttgctcaagttgtagataatataggaattataaatggaggacgactactatttcaaggaatgcctgaccctaatgaaaatctagaagaattttttacagatgttattcttaaaggaggacaaaacagatgaatgctttacaatcagaacttttaaagtataaaagaacatttatgggtaaacttattgtttttttcccagtgtcttttgcagcatatgcatttataatgcaatcaacactcatgcaaaatccattatctcaaacaacttcttgggcgtggcaaagtcttttagcattaatttttaactggtggtcatttttatttctgcctattggatttgcattgtttgctactttggtagctttccaggaaaaaaaagctggaaattatcgtgctttacgtacacacaatgtgtctcctatgacactttggattaataaagttatagctatggcagtctacagttttatttcaacgttagttttaatagtcgtaacaattataactggtttaatattgaaagctggtccagttccttttggacagattataggggcaagtattgtatgctgggttgtttctcttgctatacttccacttcagctatggctagctacatggaaaggtatgttcctaagtatgggagttggagctttaggtatgatatttggtgtccttgctgcgacaaaaccattttggattgcagtaccttggagttgggcagttagaatggtatgcccaatcatcaacatacatcctaacggtactatattagaagctggagacccacttttgaatacttcagtgattcctattgggattgttgtttctttggttgtgtttatagtattaacagcgcttactgcagcttggttcaataggagggatgacaaatgataaagctattatcatcagaatggcttcgagcaaagaggacagctgtccagtggcttactctttgtatgcctattattttttcattatgtgtggttttttatctcacaactaaatctggaagtacacaagaatttgcttttgaaggattttttacagtatggactgtattcatcattcctattggagtaggtattttagcaggatttatagtgcaggaggaagagcttgctggaaattttaatggttttttatgtgtaggtatttctcgtgttagattatatctgggaaaatttctttttcttctgttttgcctaactatatgcacatttattgctacgttgatactttgcataggaatgagtattgcagtgccatctggagcaacaatatggttattcctgtcagcagcaggacttgtggtgattgggacacttccactattagctattcatctttgggtgagttttgcatggggtatgggtgcatctattggtattagtatcggtggaattttgatggcagcaatacttggattaactagcgttggtgaaaaagtatgggcatttgttccatggacatggccagtaaaactaggtatgcttccaggaatttattttattaaagaagctggaactatttcaactgaggcattttactctaaagtgatgcaaacagctagtatagagcttatagtagtagcaataggtttgattatattcttgataggaggcgttatttggtttaaaatgtgggagggaaggaaaagttattagtagacgaatattgttttaatactgaccttcccataagagaaaggtggtgttatattgagtaaaatattgattattgatgatgaaatggacctagtaatgctacttgaggatgaattgaaggcaaaaggacatgaagtgttgatagcttatgatggtcaggcaggtatagagttatcaaaacaggagcctgaccttattatactggatattatgatgcctaaaatgaatggatttgaggtatgtcaggcaattagagatgatgttttatgcccaattatatttttaagtgcaaagcaatcagaaaccgacaaaatcaaagggttgacctttggaggggatgattatgtaacaaagccatttggactgcgtgaacttatggcaaggattgaagctaatctgcgtagggaaaagcgttcacagtatatcaatgaagagaacaagagatctactttgtattttgggaagttatgcttatatatgaaggaacgtgcaattaaaattgatggtaagaatattgatttaacaaaaatagagtatgatattgttgaattactagcactccatgcaggacaagttttctcaagagaacaaatctatgaaaaagtatgggggtgtgattctgaaggtgattcctcaactgttgttgaacgagtaaaaaaaatacgagctaagttttctgctgtgacaccagaaaaagaatatatttccacagtttggggtattgggtataagtggaataaaatgtaaagagagagaggttattaaatgaaaaatcaatcccttattacccaatttagacatacttttatttttattataatagccagtatagttgccacagtgattacttatgtatttgctctctatttgtatattcattccttaaataaggatatctatccaccaaactattatgagcgacaagttcctagaattgaaaaatacatcaatgaaaaaaacataactttgttatcacaatcgaatgaagaaggtttaaaaagaacgattcgtggggatgatatgccatatcaagttgtggataataatggcaatattctatatggtactaaccccaaaaaactatttaaaacaaaagaagaattatttaataattttatcaataaaactgttcgtaaaggtggttatatccatactgttccaatcaaaggggataatggaaagattgagggagctgttattctattctatcaagtcaaaataacctttgcaaatagtagagggagatttgtatttgcagttattataatggctctgttttctccatttatatatatcgtgggttttactagatggctttctaagcgctttgtaaagaatatcaatcaaccattacatctattgattgatgcgtccaagaagataaaagaaaaggaccttgattttgaaatcgactattattcagataatgaactcggtaaactttgtagtgccttttctgaaatgaaagacgaattaaaaggttctttatctgcgcagtggaagatggagcaggaacgtgttgaaatggtggaagctctagcacatgatttaaaatctcctctttctattattttgggatatacagatgcacttattggtaataatacagatgacaatgaaaaacttcataggtatcttacagtgataagagaaaatacagaaaaaagtgctgctcttgtccaaaagatgcaatatacgtctgacttagaaaagtcaaatatacaattaaatcttgttcctataaatttacctgaatttttgaggcaaaaggtgcaagactatgaattacaggctcatcaaaaggaagttgaacttatattgaaaatgaaggggaatatacaatccccaattcaaatcgacgtggataggttgacacgaatttttgataatatcatatccaacagtctgcaatacactccatcaggtggtaatattagtattactgtaaaggatgaaaaaaattgtatttcttatgagatttgtgattctggtagagggtttagctctaaagatttaaaaaaggctcttgataagttttatcgaggagatgaagctaggcagacaaaaggtggacattctggtcttgggctttacattgtcaaacaattagtggaacagcttggaggttctgttaaaatagaaaattcaaaatcaggtggagcatgtgtgaaattttggcatagcatttaactatatattttaaattaaaggggagtgtctcaaagcgaaatttttaattcgtgaggcactctttttttgtgaagttaaatatattttcattattccgacaatgaaaaaaggcttatctctattttgagacaggccttttttaaagcttatattatagttaaaaagatttattagttagatttgaaagaaaatagagacagtcattgataatttaatttatattattatctgtaaaatagttataaattgatatctatacagtcaattatattcatctttttaacttttcttaacggaataagagtagctataatacatgcaagtacagaaataatagtagcttgtaaaattgaagtaattggtatattagtgaaatcaagcttttctatagttgccatgtttataataatagcactggcatacccagcaattgaaccaaatatagcagcaaaaattccataataaacaccttcccataaaaacattttatataagctaatattactcataccaatagctcttttaactccaatctcattagtcctagtatttatatttgtatgagttgtgttaatgatgtttaaagtaccaatcaatcccacaaataatataactgcccatgctagaaattctatttgtttaaaactctctttaagttgcttatctgattcaatatatgatatccaatgagagccaggattattttcacaaatctgttcaatagacaatcttatttgttctaattttgatttatctttagcataaatatttatctggttgaacttgtttttatttgtcaaggtgttataaacagaattatatacaataacatcaacaccatttatccagccattaccttgtaaaaagaacattttatctactgtactatatatatctagttgttttttgttgattgtgatactatctttaggttttaaatttgtatgtctagtttttacacctggtgtagaaatagcaatcggattttttataaaacagatagaaccatttttaaagtcttctagtatagaatctgtaatagaaggcattaagtcttttaaagtctgctcgtcaattccaatgatttttaacatctcaccactattttcaaaatttatatctgtatctatttcaccctgtttgtattcagagtactttataaaggaagtgcgattgacgtttttcattttatctattttatctagtgttgatttatcaaaaccagatatttcatttgttaaggaaaaatctccttcttttaaattgcttactgacctagatacatctaatacattagagaactcactcaatgcaacgaatactgttatactcataaataatgatagtatagttattatagttcttcctttatttctttttaagtttagccatgctagatgtctttcaaagttttttattgctttttctcttttaatttttcttttgattttggtagtactaccagccatagcaattttgggagagacacgtgaagcatatattgctgatggtaatgctgaaataaatgaaaaaatcaaagatacattagtgcttaatactaatgggaacatatatgctgttgtatttttatgtataagctcagtaatttctttattatcatttgctagaagtatatctggatttaagatattagtgaccattccagttatgcctttagaagagataattccaattacagctccaataggtatggcaacagtacataaaattaagatttgtaaaataactatcttatatatctggtttggttcagctcctattgctcttaaacatccatactctttaattttctttgtaacagagatttttaaaatattatagattacaagtccagaagccagtaaaaccaataaggcaacaaataaagataccaatataatcatagatataccatcactattagaactattttcatctttttcaaactgtatcttaagagcatttaagtaaatccaattatattgaattgaattgtgagaaagatttatttttttagctaattgatttactatttcttgaaacttttcttgctgttttattttaaaatccaaagaggataaaatatatctcttaggtaatagattttctgatgtacctttacctacaataccatttactataccacttacatatcctgtataatcatcctctaaaatgccactcaatttaaagttagctgtgtaattatatggtggtatggtatcatttaaaagtgaaatatctaaattcataggtatagtcactcctagtcttggttttatacccataagctttagagtgttttcatctaaggctatttcgtttttatctttaggcaaatgtccagattttaatttcattaattttgggtagttagaaagtcctgttttatcatactcttttacaagtacagagataccagaatcctttattttactactgccaatagttattgaagtaccagcttgataaactctatcatctttctttatgtcatcaacttgatttttagtaagttggtgaaaggatacatgtctatcaccattaaaagaacgggcttgttcaattcttaaattttgtaggataccaattgactgtccaaccacagttgtcataatagttgatagtactattgctataatgatgaatgtagtcataagtttctggctttttaattcttttattgaaagtgaaaggtaattcttcatttctatttcacctccataagaacaccatcaataattgaaatttttctatcagcaagttttgcaattctatcatcatgagtaattaccactaaagtctttccaaactgttttgaagtttttataagaagattcataacttcactgccacttttactgtccaagtttcctgtaggctcatcagcaaatattatatctggttttgcaataagtgctctagcgattgcaactctttgttgctgaccgcctgaaagttcatggggaagatgattgagtctatctgcaattccaagtaatgatgaaatttcatttaaatagtctttatcaggttgttttttatctagaagtacaggcattgaaatattttcagatgctgtaagaacaggtaaaagattaaattgttgaaagacgaatccaaaggattttcttctaagtgcagatagttctttttcagtgtgtttatatatatctttatcatcaagtaacacttgtccagaggtaggattatctaatccacttaaaatatgtaaaagtgtgctttttccacttccagaaggtccaattacagaaacaaattcacctgagtttatttttaaatttacattattaagtgctataactttattgttattagaaccatatatttttgataattgttttgcttttataatcataaaaaacactctccttttctatataagaagagtgtaagttttaaaactcaattttttcccaacttttagcttaaatctaaaaagtcttcactatttacggataattcgcagtgctgataagcagtttcagtatcatttttaatttaaaatgtaatttatgcactaaaggctttacaatacaactctattgctttaaaactattttacacataaacttgtggataattttttatgttttacttcctcattattatataaattatttttgtcacaaattctaagttgtcacataaatatactttttatatcacgatttaattcttttgattttatcataattgctatttcttcaaaagaagaaagaaaagccacgatacatatcataattcctgcaacatcaagaccaaagcaaatatagagtaatggaaaagcaaagatagaaattccagtgattttattcatcaaagtatgaagcgatgaaaatgtgcgatacttaaaaaaaccaatactgtaactaatcaaccgtaataatgctattgcaacaatacaccaccatagatacatgggaagagcaatattttttccgacagtaaccaaaattgtaaccgcaaaaatgaaatcagcaatactatctaactttgcacctattccactttgttgtctcaactttcgggcaataagaccatcaagtatatcactaattccacaccaaaaataacatatccagaaaggcagtgaacagaatgtagaactaagcattagcaatgcaaacacaatacgagagaatgtaatattattagcaaaacttttaatataatcacctccaaaattctagtttcatactattctacatatttaaatatatatttctattattgtttcaaatgccttttgccaaaatattataattgaagcaactcttacaacttctacaaaatagtatatatattggttgtaaattgaaatacattttataaattctaaactaacaaagcttatataagaacaatgaaagcttacaaaatcattttaatttcttgttgagaatttagcagtaattttagcactgttagtagaattattttcaatagaaatagagccaccatgtttttcacataatatttttgagatatgaagacccataccaaagtgtggattgctgtcatttaaagtcttatctctatagaaaggtcttaaagctaattttagagattccttactaaatcctataccatcatcttcaattacaaaggtaaggagttcttgttcaagatatataagtatggatacattatttctagcatatctaaaagcattcgatattatattttcgacgactctaagaatgatattttcatcaaaaaatagatttatattatttatttgacttttaagtgtaaaagattttccttcttgtttagcaatgatagatatattttcatctaagttttctataaacttgtttatattcgacatagattttgaaacaactaaatcttctaatcgttgagcattactcatattttctacatagtattcaattctgttaatatgctcagacataagttgtgtggttgataaaatcttctcatcactaagtttgcctgttggtatgtattttgttaaatagtttgagtaaccttttagaactgttaggggatttcttaaatcatgagaaaaagcagcattaagttgttttctatcattaatcatagtccacatatttatgttgtttttatttagttcagacctcattttttcaaaagcattacatagattacctaattcatcattattattatattctaagcaaaaatctaaattgttgttggatatttccattgcacctttattgaggatttctatgggtgtttttaattttaccttgtaaaaaattatatcagctaataataaaagtcctataaaaaatataagtggaagtacaagctgaagtatgttgattatattaagtaatgttttatcataatcactaaattggttcacattgttttgaactatggttataatacctgtatttataggtgtttttaaatacttatcttgtatagaattatatagattattaagtaaaatgtatgcgaaagtagtaagtactgatgctataattagtgaagataaagtaagaacaaagaaagctttttttaatgacatattacttattttatccatttataaccaactccccagactgtttctatataattttcaagagtatgttttgatagtttgattcgtatttttctaatgtgttccattataacatcactatttccattgctattgtatccccagactctatcatatattttttctttatcaaatacctgtccaggattcatagagagaagctctactatatcaaattccttttttgaaagtgaaatctgattattatatatacaaattaaccttttttcgtaatctattgttaaatcattataaaatttaattttagtttgatttgacttcctttgttcacgtcttaaatgtgcagatactctagctccaagttcgtctaaatcaaaaggttttacaatataatcatcagcaccagcacgaaaaccatttatcttgtcagtattttcaattctggctgtaagaaatagaatagggcatgatacataatctctaattctattacaaacttcaattccatctatttcaggcatgtttatatcaagtagaatgatatctggatttttggatattttttttaatgagtcttttccactttgagcagtgtaaacctcataaccattcatttcaaagtaatcttttaagagtgttattataccttcctcatcatctacgacgagtattttattgttcataagaatgctcccttctaaattaagtttgtatagtatttatattttagtataaaaatctcaataaattctcaaattcttagttatatttcaaaacttaatcattaaagttagtatatttttatatattaaataaatcaaggatgaaattattagaaattttaatagaatatatatttgatatttaatatttattggaatgcaaaaacacagctgatgaaatcttataatttaagttgaaaatggataaatagaaaggaaggattttaattaaaaaggtagattaattaaaaagtatataaattataaaaatgaattaatctacattaattagttgatatatcaattattattattttttcagttgcttaaaatatacttgatatatcaactaatgttgttttttaattaaaagaaattttaggaaagataatattaactaggagagataatatcaacattgaagaaggtagagcaatatttttacataattgtgaacattatctggcatgtgtgcattggtgttttaagcaagcaattcaatagaaagatgtgactaaaaatagaaagaaataccataatccacatgtaaagctagaagacataataagtaaaaaaagtaaagatatttaataaaagaaataactaatagtgattaaattagtaaatgctgacaattagcataatcattagtaattattagtattatttaattaaattaattttagcattatttttattaaattaattttaaatcaaattaatgagaaccccataaatttttttaacacttaatttatgatttatggggttatgttctgttttatttcaaagtattaagttcatataaatcagttcttctgtgcttaagaagtggtaactgttgtcttatgtcaggaattaaatctctatcaatgtcagcataaataatacattctttttcatcagcttgagcaattattcttccccaagggtctgaaattcttgaatttccaaaagctatataagaagcattcatatttctagcaggtgcagcaccaacatagaatatctgattatctaaagcacgcattcttatagataactcccaatgggcgggaccagtagtcatattaaatgcagcaggtaagataacgatttcaacacctttaagagccattaaacgtgataactcagggaaacgaatatcatagcaaatagctataccaacttttccatattcggtatctattacagtgacatcatttccagctgtaagagtatctgattctttaaaactaacttttcctgtaacttcaatgtcaaataagtgcattttacgatgttttccaattagagctccatttttatcaaatacatagcaagtattatagatttttccatattctaactcaggaatactaccagaaactagataaattccatgtttctcagctaatttactcaatatcgttgttgtttcacctggatattcttcagcaaatttaggaaaatatttattttcatatgggcagttaaacatttctggcaaaactataattttagctccattgatggcagcttctgttaccatatctacagcatgattgatattttcaattttattttctgtggtcatcatctgacatactgcaattttatagaaattcatagaaattactcctttcaatatttttatgttattataacatattaaataaaaattagatattcttagattgacctaaatgggtatggagagaagtgaataagaatattaaaaggtatataaaagttatttttattatagatggaacccatatattgactttttttatatatgttgatagtattattatagataaaatagaataattaatagagttttatagggttttgcaattattaatgattggcctggtccgagataaaacccacaacatagtttttgttgtgaacacggaaggacaaaaacctgggagatattttataatatttctcaggttattttattggaaaaataagagatacatttgaaaagagggatgagtttatgaaatggttatttttgtttgttgcaggtttgtttgaagtgttttgggcttttcaactaaaaaattcacatggattttctaaattaactccaagtatacttactgttgttggaatgattgtaagtttttattttttgtcattagcactaaaacatcttccacttggaacttcatatgcaatatggactggaattggtaccgtcggtacagctattgtaggcatggctatcttaaatgagcctattagtatatcaagaattgcatgtataggctttattgtggtgggaattgtagggttaaagctattatctactaattagagtatattaatttaaataagctatgaaattaaaggcgagaaaatgtttaaaaataatcaacatttaaaaagtctttacttcatagcttatcttatttataagtttattatatttgaaaattatatgtatatactatttatctaataaaagagcagttaaatccatagggtcaactattacaccatctttataaacacgcatatttccagatgctatttcatctattaagattacttcatcattgtagaatccaaattcaaatttgatatcataaagttcaagacctttttcagctatagtatcacgaactatattagaaattttttgagtcatgcttttcattgaatcaaattgagcttgagtcataatgtttaaagcttctaaaccttcagatgttataagagggtcacaacggtcatcatcttttaaagttgcttctacatagcaatctagtttagcaccttcttcaacacatgaaccataacgacgtaagaaactaccaacagctctataacgacaaataacttctaatccattaccaaaaacttttgctggtagaacttccatagttgcttcttctaaattagcacttacataatgagttttaattccagcattgtttagaatttcaaagaacttaacagatgtctctaaattagctctaccaattccatctatacttagacctacactattttcgcctgggtcaaatactccatctttaccagttacatcgtctttaaatttaagtaagtaatttccattatctaattcaaaaacatctttagtctttccttgatacacttttttcataaacaacctccaaaaagttaaattattatattgaataaggcattagtgtcaaaaaagttctgatattcgcatgaaaatttatattgataccttatatttaatattatatcacaaatagaagggaaatttccgaacaattttataaaaataacaaaaaaagtacattttataaaacttataataagagaactaatataaaatgttagtgtcgtttatattgacacacataagttttaatataagaaacttttgacacactttgacacacatttaatgataattttataaaatgcatgaatgcaatgcttacatatattggcatgaaagttgctttagatatttaacatataaacaatagggatatattctcaaataaaaagtaggggtggttaatagtgaagtcagttagattctatggtataagagacacaagagtggaggatgtggatgtaccaaaaatattagaaaaagatgatgtaataattaaagtaaaagtagctggaatatgtggttctgatatatcaaaatattcaaagacaggtccacatatggttggagaaattttagggcatgaattttctggagaagtggcacaggttggtaaagaagtaaggagttttaaaataggagatagagttgctgtttgtccagctatgccatgttttgaatgtgatgaatgtaaaaaaggattgtattcaagatgtaataatgtagcaataataggaaataaagaacttggaggttgttttgcagagtatacaaaggtgaaagagaggaatttaataaaaataccagatgagataagttatgagactgccgctgcgctagaaccagtatgtatagcagggcatggtctttttagatcagaagctaaagttggagatactgttgtagtacttggtacaggtacaataggattattttcaatacaatgggcaaagatatttggctctacaaaaataatagctgtagatgtatttgatgagaagttagacttggcgaaagagttaggggcagatatttgtataaatgcaaaagaaaagaatattgtagaagaaataaaaaggttaactgatggagatggtgcagatattgttattgaatcggctgggactccaatgacatgtgggcaagtattgttgttagctaaaaagggagggacagtattgtatgcaggtgtaccatatggggatgtagctttgactagagaacaatttgaaaagatagtaagaagtgaattaactgtcaagggaacttggtttggaaactcttttccattcccaggaaaagaatggagtgctggattgtatcatatgcaaaagggtgatatgaatgttgaaaaattagtaacacatagaataaatttagaagaagtaccagcttattttgaaaaagtatacaaaagggatattttctttggtaagataatgattaatatagataattagattagagtactaaataataatccatataaacaaggttaagaaaggtatgattcatatgacagggataattatagccacacatggaaatatggctaaagcaatgttagaaagtgctgaattaatagtaggcaaacaggaaaatgtagaaactttaggattaaaccatggtgacagcatagatgagtttagtagaaggttagaagatagaattgagaaatataaggatgaaggggttttagtattgcttgatttttatggcgggactccatttaatacatctgctattataataaataaatttgctaaggtatgtgagttagaatgtttgacaggtgtaaatttacctatgcttttagagctatttttaaacagagatactatgaagttaaaagacttgaagaatttatgtgaggaagttgggatatcaggaatcaaagatgttaaaactgttttaaagttgtaaaataaattaaaaatctggaggaataattatgagtaatatagcattaacaagaattgatgatagattaatacatgggcaagttattactgcttggtgtaagattacatcggcaaaaaggatagtaatcgtggatgatttagtagtaaaggacccatttatagttcaagttttacaaatggcagctccatcaactgttaaggttgaagtacatgatgtagaatcaggtgctgaagttttaaaatcacataatggagatgaacatttaatagtattggtcaaataccctaaaactgtcttaggtttagtaaatagtggggtagatttaaaggaattgaatgttggaggtatgggagcagggcttggtagaaaaagtttttataaaaatatatctgtgtcagatgaagaaaaagaaatatttagagaactaatatcaaaagatgttaaatgctttatacaaatagtaccagatgcaaagaaaattgatgtaggaacattattataaaaaagactatcttgtaaatctttaaaagaaaatagggaggaagaatatgcacatttcactaattcaagcagtattaatagcaattttttattatctttcttggagtccgtggttgacctatgttggattttttacatggaatagacctctattggctggatttgtaacgggaattatattaggagaccctgttcaaggagcaattataggagcaggtataaatatgatatatctaggttttatatcagcagggggagctcagatgggggacccagcttttgcaggatatgtaggtactgctttagctatagcatctaagctagatgtaagtactgcaatggcaatagctgtaccattgggaactgttgcaactgtactttggattggaaaaatgacagtaaattctttttttgcacattgggctgatagagaggttcaaaaagggaatgttgatagagtagcatttataaatatagtaccaccacagatactgttatttgcaatgagttttataccagcattattagttgtttattttggtccaaatgcgatagatggtatgttggaagtaatgaatgagaatgtgttacatgtatttaatgtaattggggctatgttgccagcacttgggattgctatgaatttaaaattgattggaaacaagtttactatgccctttttcatattaggaatactaatggctgtttattttaaagtagatataatagtaatatctgttattggagtaatacttgctcttacaattacttcaattaagtacggaaaagatagtgctacatcttaaatacatgtgagggggaaaatattatgtcagatataaaaaatgaagtatctaagaaaacgttaagcaaaaaagatgtaataaaatcatggttaagatggtttttctttgcgcaatctaattacaattatgaaagattgcaatcaacagctttctcacattcaatgttgccagtacttaaaaaattatatccagataaggaagagttaaaacaagaagtggagactcatttagcattttttaacacagaacctatatgtggatgtgttatacatggaataacaatagctatggaagaagaaaaagctaatggagcagatgaaataagtggagatggtatgaatgctatcaaaacaggcttgatgggtccactagcaggaattggtgatactttaactcaaggagttataactcctatagtgttagctgtttgtattggtttaactgagggaggagcatcaattgcaggtcctatattatttgtaatagctcaatatataataatgacttcaatttcttttggaatgtggacaaatggatataagtatgggaaaaaagctgttgaaagtatacttcaaggtggaatagtaaataaggttatagaaggggcttctatattaggtactttagtcatggggggacttgtaggtaggtttattaatttatctacaccaataagttatactagtggtgattttaaatttagtcttcaaacggatttacttgataagatatttccaggattaattcctttggtacttactttattagtactctttgctttaaaaaaaggcctttctccaataaaaataatgtttatactgatagtagtgggagctattacaggtattttgggactattttaaataaatatatatgttggtgtgtaaattaggattctatatctattgattatatttgtaagatgttggaaaatttatattaaaaagtttagcaattagggtaattttataatagattaaattttaaacttatataagctatatatagtatttaatattttaaaaagtatctcagaaagatttttaatcagaatgaggtgctttttcatttgcatataaaatattaagtaatttcaaaaaaatataaatttatttaatttaattaaaatattataatatattagttacatattaaaatatataatcgagatattgttaagacattgtcgagatattataatatataactaatgtattataaatagttgtaaacttcctgtaacatatattttatataattaaagtaatggatataatatgaaatataataatgaattttagggatgtgaataaatgaacatattaattgctgatgatgaaattagtatgcttaagatactttgtgcatattttaaaaaagaaaacttcaatgtgtttactgcaaaaaatggggaagaggctttagatattttttatgaaaataagatagacttagctatattagactggatgatgccaataattgatggaatagaggtttgtaaagagataaaggaaaatagtaatacaagggtacttatgttgactgccaaaagtcaaagtgaagatgaaatagaagcactcaacattggagcagatgaatatataaaaaaaccatttgatcctagagttttaataataagagctaagaaactaataaattataaaaatacaattaatattaaagatttaaaaatagattttgggtcaagtaaagtttttaaaggtgataaggaattattattgactaagaaagaattagaattaattcgttgtttaatcaataataaaggaatggttttatctagggaaaaacttttagatttagtatggggattggattatgagggagattttagaacagtagatactcatataagaagattaagggtaaaaataggagaagatataataaaaacttatagaggattagggtatagtctggaggattttaatgactaaactaaacaaaaaattgtccataagtatatctatagtagttgtagttgtttatataatatctataattataaatagtatgtttattcatagatattatttacatgaaaaaagaaatatattggataatgttgaaaatgaaattaaagataaagacatagataaattaaaatcagacattactttaattgaagaaaaaaataatatagatatcgtatatatagaattagataaaaatcataaagataaaggtaatatagataaaataaatcaagatttattaaatgcattttggaaaaaaggtttaagtttaaataagttttggattgaagaaaatagtttaaataatattgataagaaaagtataaataagatatacaatcaaggtaaaacaaaatatagtttgcttgtaaaatttatcaagaaggataattatttgtttgctatatctatacctatagaacattctgaagaaactattggcattgtaaatagatttaatataataatgggaattttttcagtagttataataactatacttacatttatattatcaaacagagttataaaacctatggaaaggttaaagtttttatctaaagatatatctgaattaaattttaggactgaagatataaaaacgaacgatgaaatagaagagctagcttacagcataaacataatgagcgaaaaacttgaaaaagcacataatgaattgaataaaagaaatgagaatctaaaaacttttatatcagatgcatctcatgaaatgaaaactccaatagcacttataaaagcatatgcaataggtatgaaagatggtttggatgatgggacttatacagatacaataattgaacaagcagaaaatatgaccaatacaataaattctcttttatattgggcaaaatatgagaagaaggagagaagtctgtgtctggtagatttaaaggaaaggttatataaaagtttaaaaaactatgagctgttgatagaaagaggtagtataagtgttaaatgcagtgtagatgataaagaacttataataagttcggatgaagatagtatagatatggtatttaataatttgattagtaatgctataaagtatactaataataatgaaatagagattaatctttttgaagagaatgagagaattatattatccataaaaaatggtatagattacaatatgggagatgatatagaaaatatgtggaagcctttttatgttttagagaagtcgagaagtaaggagctttctggtactggtcttggtcttaccatagttagaactatacttgaagaaaataattttagatacagggttgaaatttgcgatggaattatagaattttatattatctttataaaagtaatttgaattaaaatgtaaatataaagaataattaaaaaaatatcgcaattatttgtttttcatatggataaaattggttatttaatatataattacaagtataaataataaaatttatttgtaaaaagagtagcacttttaattctaaaggctactttttttatacaaaaccatgttttttataacaattcattaacataaaaatcaaacttaccttaaaatataaatttacaaatttttcaatcaataagaaaatttctctattccttacataatgactgtaatgtaacaaaataattacaaattaattatgaaatcattatagttagaaacctctttaaaattagatattaagtatcctttagaattagaacgggaacaaagttaaaaaattaagtaatatcaaatggacaagggggaagaaaataaaatgaaaataccaaagaagattgctgcaatgcttacagttacaatgatagctggaagttcaacagcaggcatagctagtgcacaaactgtggcaacaaatttaacagggcaagaaagatatgaaactgctgttaaaataagtcaagatggatggaaaaatgctgatgaggtagtaatcgtaaacgactcatctatagcagatgctctatctgcaacaccatttgcaaaagcaaaaaatgctccaatacttttaacaagtaaagataaattaaatgataagacgaaagcagaaatacaaagattaaaagctaaaaaagtatacttaataggtggaacttctgtattaagtacaaatatagaaaaagaaataaaagatttaaaaatatcttttgagagaatctctggagctgagagatatcaaacatccttagaattagcaaagaaattagatgctataagtgatgttaagaaaatagctgtagttaatggtgaaaaaggacttgcagatgctgtaagtgtaggagcaccagctgcacaaaacaatatgccagtaatacttgctgattctaaaaatggaacagcagttgcagacaaatttataaaagatgctggaataactcaatcttatgtagtaggtggagagagttcaatttctgaagctgttaaaaataaactaccaaatagtacaagactaggtggaacagatagaaatgatacaaatgcaaaagtaataaaagaattttataaaaagacagatttaaaaaatgcttatgtaactaaagatggtatgaataaacaagaccaacttatagatgcactagcagtaggtgtattaggtgctaaaaatcaatcaccagtagttttagttggaaagaacttatcagcttcacaaaaatctctagttaactctaagagttttgataagataactaaagttggtgggaatggtaatgagacagcatttaatgaaatgaagtcattacaagaagtaaaaacagttgaagctaaaacaatttctgaattaaaatcagctatagataaagctactgctaatgatgttataaactttaagccaactagtgaggttaaagaagcatttacaatacaaactgataaggcgataacagtaaacttaaatggtacatatacaaagactgtgactatcaacatgcctaatggtgatgtaaataactatgcaaaagtggatgatgtagttatagatgatgtaaaagatggaacttttgttaactacggaaaaataactaacttaaaggttaatgataaaaatggagccaagatagaaaataattctaaaggtgagattggtagtttaacagtagcatctggagcaagtcaagtaaaagtgactaatggtggtaagataactacagttacaaataattctaaaggaactactatagataataaaggtacaataagtagtgttaagggagataattctccaacaataagtggaaatagtccaagttctaactcttcaggaggaagttcatcaagtggaggttcttcacatggaggaggaagttcttcatcaaaagtagataaagtagttttgaaaaatacaataacagcagcaaataaattgtataatgaagcaatagagggaacaaatgtaggtgaatataaagtagggtcaaaagcaatatataaaacagcaatagacaaagcacaggcaatattagacaaatctggtgtaacacaaaaagaagtaaatgatgcagtaacagcattaaacacagcaacagacacatttaaagcaggaaaagtagtagcagtagataaaacagcattacaagatgcagtaacagcagcaacagcattacatgctaaagcaacagaaggaacagcagaaggaaactatgctgtaggatcaaaagcaacgtataaaacagcaatagatgaagcacaggcaatattagacaaatctgatgcaacacagaaagaagtaaatgatgcattatcagcattaaacacagcaacagagacatttgaagcaggaaaagtagtagcagtagataaaacagcattacaagatgcagtaacagcagcaacagcattacataatggagcaacagaaggaacagcagaaggaaactatgctgtaggatcaaaagcaacgtataaaacagcaatagatgaagcacaggcaatattagacaaatctgatgcaacacagaaagaagtaaatgatgcattatcagcattaaacacagcaacagagacatttgaagcaggaaaagtagtagcagtagataaaacagcattacaagatgcagtaacagcagcaacagcattacataatggagcaacagaaggaacagcagaaggaaactatgctgtaggatcaaaagcaacgtataaaacagcaatagatgaagcacaggcaatattagacaaatctgatgcaacacagaaagaagtaaatgatgcattatcagcattaaacacagcaacagagacatttgaagcaggaaaagtagtagcagtagataaaacagcattacaagatgcagtaacagcagcaacagcattacataatggagcaacagaaggaacagcagaaggaaactatgctgtaggatcaaaagcaacatataaaacagcaatagatgaagcacaggcaatattagacaaaacaggtgcaacacaaaaagaaatagatgatgcattatcagcattaaacacagcaacagacacatttaaagcaggaaaagtagtattaaataaaacagcattacaagatgcagtaacagcagcaacatcattacatgctggagcaacagaaggaacagcagaaggaaactatgctgtaggatcaaaagcaacatataaaacagcaatagatgaagcacaggcaatattagacaaaacaggtgcaacacaaaaagaaatagatgatgcattatcagcattaaacacagcaacagacacatttaaagcaggaaaagtagtattaaataaaacagcattacaagatgcagtaacagcagcaacatcattacatgctggagcaacagaaggaacagcagaaggaaactatgctgtaggatcaaaagcaacatataaaacagcaatagatgaagcacaggcaatattagacaaaacaggtgcaacacaaaaagaaatagatgatgcattatcagcattaaacacagcaacagacacatttaaagcaggaaaagtagtattaaataaaacagcattacaagatgcagtaacagcagcaacatcattacatgctggagcaacagaaggaacagcagaaggaaactatgctgtaggatcaaaagcgacatataaaacagcaatagatgaagcacaagcaatattagataaagcagatgcaacacaaaaagaaatagatgatgcagtaacagcattaaacacagcaacagctacatttgaagcagggaaagtacctactacaattgcattaatgttatcaagaatactaggatttatgaaataagaaataaaaagcaaattatttaataaaatttatatatactttaaatagaaaatttaatttaaggctgtgagtaaaatttttaaaaataaatttatacacagcctttttatcatgtaaagttaattgatatagtaattttagataatttagagatataaaatttaaaatgttagataaagttcaaagtataacctaatatcaaaacttcacataattttcatattaattatcaattaaattcacacacaagagttattatataaacatagaagatagtaaaactagcttaaaaacataatataataccctatacaaaatagtggcaactctccctcacatcctcaattgttgccactattttaattttttgtaaaaaacaaaaaaactccacaaagtggagtatttataaatttaatatactcttttaatagtatgctttactatactttaaaacaaacagaatttttaatctcaagttttttatttatcttagcaaccttaatcttaatcttatccttcaaaggaatacatcctatattactttcactttttacatcaacacttccaacaaatttaccagagtcattataatactttgcaacaccaacaatatctcccttatggataggataattcatatttttaaacactaccttaggattgatattttcgttatctgaaacaacaccatacaaatctttatcaaccttaactgttatcttaaaatcatcaataccatcaacacaaggagtctctataatatcacccttatgtgctatctttttagaatggaaattatctttaccatatttcaataaagtagcggaagaagaaattctatttttcttgttaccatcaccaagtacaacacctatcaatctatgatttctttcgtttttagcatctttaggtaccatcatagaaaatgcaaggcaatatccagcattatctgtatagcctgtctttattccatcaacaccaggtactgaaacaagtaggggatttgtgttataatgtgtaaaatcctttttagtatcattatatacttgcatagtggttattcttgtaacttgattttcataatggtcatacatatactttccaagtgtaactatatcgtgagcagttgacatattttcaataggaggttctttatgttctgggtcagtatatataggaagcccatttggattaaaataatacgtatcaatcattcctatttcttctgctttcttgttcatcatatttacaaaattcttttcagtcttaccaatatgtttagctatggctatagcagcatcatttccagatactagcattagaccctgcataagctctcctagagatatttcatcaccatctttaagtttacaagtagaacctcctactgaagctgtagacttgtctattttcaccatatcagtctcttttacttgattcttatcaactgcttctattgccaataaaaaggtcatcattttacttaaactcgctaatggcattttttcatcaatgtttttttcaaataatattcttttagtttcctggtctataagtagtgctgctcttgaagaatttggtactggtggagtatctgcaaatgcaaatacaggagttataaatataaaaattaatgcaagtattgttaactgttttatttttcctttcaaaatctcgtcctccatttcatatattaattaatatgcacaaaataagtgctataaattttatttatttagatactcattaatcatgtctattatataagcaatttcttcgtctggtatcaaaatattaaaataagcttctgttggcttaaaggcttcacgtattaaactatatagttcatgatttttactaattaattcagtaatgttattatatggaaaagttgtatttttaaaacatctttctatcataaaagagcaatgtagtatatatcctagcttaaatttgctctttaagttttcatctattaattctattattgtaaataaggaagaattgacatagttgaataatttaacagagtccaaaagttctaagttttgggtcataaagtttattattaaactgttgtatgatagatttgtttcttttatatttgtaatactattggcattgaatgtaccttctattattttgtttagcatatctaggccatatccatttagtaattcctctatgtgtataaaaggggtgttggctacattaaaatctacacttccaacaactgccagaattttagtattactaaatttattcttatacattttaaaactttctatattatgaggaactaaattaatattgtatttacgaatatttttaagtgaagaatttataaagtctgctactttcatagctgaaccatatcctgttatacaagtagttattattacatactctcttgacttttcaggatagtttatttctgttgaatcgattgctgctcgtccaatatatggatttaaagagcttaaggaattagctaattcatccaaagtcatttctggtaatgtactttttcttactgcttctaaaactattggagtagataccatttcaattgagcgagttttgatttttgttttttctgaaataagttctccaaaagctataagagagcccatatctgttaaaagaagtacacccttaccttcgtcacattcttttaccaactctatagttttatcaagtatggtacttacttttacatcaagaggcatgtcaattgcattacaatggtttgtaccaagcaatgaatttgctacatcacacatactgcttgctgttgaatttccatgagcaagtattatgactcctatactttcagattgattgtttggttcaagatacatgctatttagaaacatggatataaattttacttcatctttaggtaaagatgtttgtaagtcattttcaattatacttaaaactattttagatatatttaaatctttatctaagaaaattttatcattatataaattgtacttaggattataggtgtcttgatttatattttctataagtgcacttatatgcattgaaagagcaatataagtttgttttgtgtatttgtttctcgatattttttcggcctcttttaaagaatgttcaacagcatagtaaatctttggattgattactttaaaaatttcattacttgtataatcagaatgagttactgaagatatcgaaagtaattttgtagagtacttttccatgtaatttataaacatactccttatatcattttccagataaggaatctctgtagagtatttaaatccattgtttgatgtatctatattgtatttagatagttcttttgtatattcaacttctaagttattaccattaaattcataaaaaagcatataatcaagttctgataatttatttagattactacgattttcattcaattttaaaagaccaatatagatgtaatcaggaacaagggataaatctatttctatattatccttaagtccagttttgtaatttaaaaaggctcttgcactcataagttgtatgtcagatttaagctgacctatattaccaaaacaatcataaaggagtaatgatttaattacatctttgtgaacttttatagttgcattggtgtattttgattctataataaagaagtatttaataagagataatctttcttttaaagacctatcctgtaaagcaggtaggttgattgtaacagggattcttcttaaaaaagtcccaagcagagaagaatgtatatcttctgttgtggcacacacaataaagacattagctttgtgcacaatgtcagattctcctaatcgtctgtatatgcctttgtccatcaaaagaaaaagcatctcttgaccttctggtggtaatctgtgtatttcatctaagaataatatgcctccatcagcctgtgcaactatgccgaatttatccttattagcaccagtaaaagaacctttgacataaccaaataaattacttaataataagttagcattttctgcatattcagcacagttaaatactacgaatttgctttcagaagaaaagattttactttctacagcatatttgtacattgtttcggcaaatgtactttttccaacaccagtaggtcctatgagtaacgtattaagaccttttggaggatagagtatagcagatttagctttttctataggtagtttaagactagaatcatgtccaagtaatgttgaaaaaatatcttctgagtcatttttacttgatttaagtagctcattacaattatttatagaaaattcatcactgttcaaagtacggccaattaaattttctataatactaacatgtagaaataaaattggcttaccagatattttcagaacttttttttcattatataggttatttaattctttactggtattacttctatcaagagatgaatggttagcaatttctattgtagtgaatcctgttttatctgattgaaggtcttttaaagtcatattttcacataatttatgtagagataatagaactttatcttttcttagcatataccatttcctttctttatgtttaaactatatttaagctacattaaatatattataatatatattcagtattaaaataaggtttatagtggatattttgtattttactttttaatatgttgttttgtgtaatagatggtgttaaaataagagttgcattatattaggtatggatttttatagattaaattagagtattatgttgttaaataactaaatttaagttttttaatatacttcagtctatgtaatatcatttattagtatatggtcaatgtaattaatatatggtcgatatagatgaagatatatgaaaaaactgataaggttaagaataatttatatatacacagttaatacatatatacgtttacaaattatattttgtatcataaaaataatgttttatattgtacatatataaatatgaagttgctataagcttaaatactcaagagaaagaattaaaagagatataattttatttgtagtaaaaagttatacaatttagaaggttatataaatggttgaaagtgtttgtcaaatattaattcagccattttatggtgtaaacaagcttaaaatttgattttgacaagcataaaaaacaagttttttcataaaatgtaaatattggatatgaattatttaaaatagtttaaataaataatatcttgtattaaaatatgaataatactataaaagaatgggagatatgttttgtggatatagatagaattttaaacttttcctcaaatgcaggtaaagctatgttgcaaagtggaggagaaacctatagagttgaagaaacgatagctagaatatgtcaatcttttggaatagaccacgtagatgtatttgcaactccaacagctgtaatggcatctgtatttgtagatgggaaattacattcagcaattaaaagaataagctcaagaagagtagacctaaacttggttcatgaagttaactcattatcaagagcaataagtataaataatttagatattgaattatgtgagaaaattttagatgaaataagtgaagataactattactcggatttaataacaatattttttgcaggtattgcagcagcaactttttcgatattatttggaggaaatgtggaagaatttatagctgcatttactgttgggattctgactaagtttgttattatgtatttaagtaaatcttcacttaatgacttttttgtaaatgcaattggagcagttattatagcttcttgttcaattttaattttaaagctcggatttataaagacgttagaccatttaatagcaggagcaataatgctcttagttcccgggcttgctttgactaatgcattaagagatttgttagatggacagttgatttctggtcttgcaaaattagcagaagtattttttgtaggtgtatctatagcagtaggaatgttcttggtacttggattatacttcaagttaggggggatataagtgcatttgtttatagaagtaatagcagctttttttactgccttaagctttggagtgctatttaatatgaaaggaaaaaacttaatactagcaggaataggtggaagtatagcttggttttcatataaatttcttttaaatatgggagtaacagaaaacttatgtttttttatagctacagtttgttttgcgatatattgtgagttatgtgcaagaatttatatgactccagcaactacattaagtgtttgttgtttaataatattagtacctggttatggaatatataatactatgtattctgttttgaccaataattatataaaagctgtagaatatggggtgagtacattatcatgtgcaagttcaattgcattaggattggtatttataactactgtatttagaaaagtcaacttatatggagtgcttacaaagataaaagaaaatgaaaaatataaaaagagtataaataaaattaaacaacaaaaatagaaaaaattgacttttaaacaaaaggatgataatataataacataaaatagaataagagtatccaaattaaagaggatattcttattctataaacgtaatttttttttatttcaaaaaactgacaacttgcattacgagtgtaagttttagaactcagtttgtaccaaaaaatttgtaccaatgttaggaaccttaatttaaaattaaaagggggaagatttcaagatggaaaagctgtcggataagagaagagtcaaggcagtaagtatggaaaccttcgtatttattgtactattggcggtaggatttggatatgtaggaagcatcatgggtgcaggaatgatgtttaaagtaataatgagtacagcacatgcgcttttattagacacagtatttttaataatggctatggcagttcttgcaggtgcacttagtgcgttgctttcagagtttggagtaatatctttagttaataagatatttaagggtcttatgagacctatatggggcttacctggtgctagtatagcaggagtagttgcaacatatttatctgataatccagctattataccatttgctaaagacaaaacatttacacaatattttaagaagtatcaagtacctgctttatgtaatttaggaacagcctttggtatgggacttattgtaacaacttttatgatagctcaaggtaaagaatatgtactaccagctataataggtaatgttggggcaataataggtagtattattagtgttagaattatgttgacttttactaaaaagtattataattatgaccctaaaaatgatactgaaaagcaaataaatgataaaggtgcaaaacttgaagagtttagagaaataagagatggtaatgtattccaaagaacattggatgctatacttgaaggtggtaagctaggtgttgaaatgggtatggctataataccaggagttttagtagtttgtacattagttatgttattaacttttggaccatctacagaccctgctacaggtcaagctgtttacacaggagctgcatatgaaggtataaaattattacctgctattggtgataagattagcttcataatagaaccattatttggattcacatcaccagaggcaatagcattccctgtaactgcattaggagctgttggagcagcaatatctttagtaccagagtttataaaatcaggcgctataactcctaatgatatagcagtattcacagcaatgggtatgtgttggagtggatatttaagtacacacataggtatgatggatgctttagatgcaagaccattggctggtaaagcgatactttcgcataccataggtggtttgtgtgcaggtatatgtgcccactttatatttatgcttgttggatagaaatgttccataattgaagtattataatttataaaattgaataaaactattgatttaagtatgtaaaaactaaattagtaatttaaatatataggtgctgttttgaaatagagatttattttcattttaagacagcaccttttagtaatttaagtacattaattaaatgtattgattgaatttattatgataaaattgtattatataaaatagagccaatttaaacagtaacaataaggaggaattgtagtaaatgaaaaaggaacgactacaacatgaagacttaaaagagtatgattatgatgaagatggctatctcagtaaaaagataattattaaggacttcataaaaactatattggttatgacaattgctactggaatatcagtagtttttgaaaaggtaggttttaatgaatctaatattatactagtatacatattaggtgtactatttgctacaagtataacctatggatatttttttggaatactttcttcagtaataggagtgctatcatttaattttttctttacgcatccattatatacttttttagcttatagaaaagattatcctatgactttttgtattatgctaatggcagcaattataacaagtactttaacttctaggataaaaagagaagtgagactttctcataagagagaaaaaatgataagattgctctatgagaataacaaaacgttgcttaaagcaaaaaataaaaatcaaattattgaattttgtgggtctaatttagtaaatatattaaatagaactgtaatagtgactattgcagatgagaataataatctaggtaagccaagtatttatatttgtaacaatgatggaagtgagaatatattccattcagtattagaaaaagaagctataaaagaagcttttaggacaggtaacccagttggaattgggacaaaatattgcaaaaacagcagtgcatattatttccctataaaaggtcaagaatcaaatgttcttggtgttataggtgttgcgtgttttaagatagatattattacagaaaatgaaaagatactattagaagcagtttcaacacaggttgcgttggcaattgatagagaaaatttatttgagaaaaataaaaaagcaaatcttgaggcagagagagagagattaagaggaaatttgcttaggtcaatttctcatgatttaagaactccacttacaagtatattgggttcgtcttcaacaatacttgaaaatgatgatgtgatagataaagaaactagagtagaattattgaaaaatatatatgaagatacgagttggctaactcattctgttgagaatatacttagtatgactagaatagatgaagggaaattggatattgaaaaacgaccagaagttgttgatgaaataatagctgaatctatattaagagtcaaaaagtttgccaatagtagagacataaaaaccaatattccagatgagataataatcgttcatgtggatgtattattaatagaacaagtgttagtaaatttaattgataatgctataaggcatacacctaaaaattctaagatagaactaactgtaaaaaaagagtcaaatcaagtgctatttgaagttgcagataatggaaaaggaataccaaatgaagatatcggtaatatttttaataggttttatactaagaataagtctagaaatcttgaaagaagaggtattggtcttggattggagatatgtaaatctatagtagaagctcatggtggagaaattgtcgcatttaataatccttctggaggagctacatttagatttagcatacctatgtatgatgaggaggggaaagacaagtggaaataaagccattagttctaattgtagaagatgataagccaatttgtaaatttataaaagtatctcttgaaactcaaaattataggtgtgtagagacagataatggaggaacagctatatcacttatacattctcttgacccagatttgataattttggatttaggactaccagatattgatgggattgaggtaataggacgagttagggcatgtgcaaagactaataaaataattgttgtttcagcgagagagcatgagagggataaggtggaagctttagatggaggagcagacgattatttaactaaaccttttagtgtaacagagcttttggctagagtacgtgtggctcttagaaataaagctcaacaggataatataaataatgatgctccaaagtcttttgaagttaaaaacctaaagatagattatgaaaatcatattgtgtcaattaatggtgaagaaatacatttaactccaatcgaatataagattattgagttgatgtctaagtattcaggaagagtcttaactcataagtttataatagataaagtttggggaaattactatgaaagtgaaaatcagtcgcttagagtttttatggcaagtataagaaggaaaattgaaaagaatcctgctcagccagaatatattttgactgaggttggggtaggttaccgtatggcggatgaatagatactaaatgattagttgctgagtgattactaaatgaatatgagtaataatcagatagaaattatttgttatgtaagaaaatctaagtattttaaatcgaatacaaatagctatgtatattttacaatgaaatggatagagagttaatctatctaatcttgaatttacatagctattttatttttttaagagaatacaaagtggatgatgtatttctgtaatagaaaaagtatccaattttagactaattacttatgtaatattaacttgtaaagttaggatttgcctatttcattttttcttagttttgacttgtcttacagctatcattgtagttgcaaaaaaactcaatgttgcaccagcaaatgctgggtaatgtcccataaatccagcaatacaaaaacatattcccactacaaacaacaagaaactaaatattttcataactattctcccactaaaatttaatttattaagcatattttagcagatattaatagtaaaatcatcagttttgatgacaggaaaagtatatcatattttatgctttattatgtcttcttcgttgattacttattagaccacactttttaaagtgtgctaagtgttgttttgcaacaaactcttaataactatatgctaataagtgtaagggaagtaagtagaattgttaaatatagcatctatatggataatatcaatttatatatggataatatcaatttaacattttttttgatataaaaaaattaccctttttgtctttttatatcagcctttgtgatattatataatatatcaaagtaacaatctagataatttattattgaagaaattttaatatataatagttttatatttttaaatgaatgaagtattatcttcatatatgattggaatacttaattgaggtggagatttgtcatttatatgagaattaattgtaaacacataataagatagttaattataaatatattaaattaggtattacaaaactctattgtacgattgacacaataataattctatttactaaaaaatagaactttattaaggtactattttaaaacataaagaagtataatatcattgccaaatatatagcaaaattttaaaagctttaaaaattcaatctggaaaatgaataaaaggagatatatataaatggatgtaataaatttaatagatgagttggatgaaattgtatatgtttcttctttagatacatatgaacttttatatattaatgaaattgggaaaaaggcaatgggaattaatgatatatcccatgtaaaatgttataaagcattacaggggaaagattctccctgcgaattttgtacaaactctattttaaaagaagatgaatattacatatgggaaaatacgaatactcgaacaaatagacattttatattaaaggacaagttaattaaatgggagggcaaacatgcacgattagaaatagctcttgatattacagaaaaggaagatataagtaagtcaatagcagaaaaattagagataaaggagttattagttggatgtattaaacatcttataacagaatctaatttttctgatgctgtaaatcttgtattaaccaatattggtaaatttcataaagctgatagagcatatgtttttgaagtatcagaagatagaaaaaaagtaactaatacatatgaatggtgcaatgaaggtgttgatgaacaaaaacaggcactaacaaatcttgatattaatgaattaaagaattggtttttattattcgaacaaaagggttttgtaataattgatgatatagaaaatataaaagaagaacagccaatagaatatgaaattttaaaacctcaaaaaattgaaagtttaatgacatcttcactaaaacaagatgataaagtagtagggtttattggagttgataatccacataaggctgttggagatacctctcttttgacatccctatcttattttttattaactgagatgaaaaaaagaaaagtagaaaataaattaaattatatgagctactatgacttcttgactggtgcatataatagaaacaaatatattaagtatatagataattttcaaaaaggaaaatttaaatccataggagttgtatttgtagatataaatgggttaaaagatattaatgataactttggacatgctaatggcgactctgctattgtgtcagcatgtgtaataataaaaaaatactttcattcttataatgtttaccgtattggaggagatgagtttattgtattatgtgaagatatatcaaaacaactatttgaagaattagtgagttggttaagtgaagaatttaaggatgagatgatatatagtgtagcagtgggcagtatttggagtgacgataatattgatatacataagctaattaaagttgctgatgagagaatgtaccaagataagaagaggtattataataagaacaaacttagaaataatgaaatggaagtaattagtgacttagctgattcgacgaataatattttatttaaacataaagagttagttgataaggtttattttgatgatttaatgataaaagggtattctaaggcttatgaaaaattagcttataatacatatgatataattttatctatttgcatcgatactaatttaattactccaatttatcaatcagagagcaatatttttagttttcctataaaggaaaatcttgaaaaaactttttcatacataaaaaaacatttaattcatcctgatgatataatattatttgatgataaccaccttctaaaatctcttgatagtcttaataacagcaagcaagacgatttagaactaaattttgagtatagacgtttaggaatagataaaaagtactattgggcattaatttatatgttaaagattagtagtaaaaataagttaggtgagaaacaaacacatattttagttgctataaaaaatatagattatcttatgcaactacataaaaaccaaaaggatatattaacaggactatacaattatgaaagtttttgtgaacaaacaagtttaatgcttaaaagatatcctgacaagagctatgcaattataatgatggatatagataagttcaaggtaattaatgacatttatggagttagaggaggagataaggctttaatatatgttgcagaattgattcaaaaaaacattggttctaatggtatatgttgtcgtatgtatgcagatgtattttgtattttttatgagagttactctgatagagatgttcataaattaatttataagattaaaaatagcttaaatagaaaaaaatttgaatatatgttagtaccatgttttggggtttataaaattttggataataatattccaattacaaatgcgtgtgaaatggcaggatatgctcacaaaaaagtaaagaaacaaagtatcaataactatatattttatgatgatactataagaaatgatgcacttgaagaaaaacagatggaaagggaaatggaatacgcacttgaaaatgggcaattccatgtatatctacaacctaagtataatcttaatgcaaataaaattgttggtgcggaagcattggttagatgggttcatccagaaaaaggtataatacctccaattaaatttatttcactatttgagaagaatgggtttattatcagattagacatgtatgtgtgggaacaagtatgttctttgattagaaaatggatagatttaggtgaagagccagttcctatctctgtaaatgtatcaagattacatttgcataatccacattttaaagaaattgttttaagtttaataaataaatatagtataccaaaatcttttttagaattggagcttacagaaagtttatttattaaaaatataaaattatttactaagataatagccgaccttagaatggatggtattgttttaaatatggatgactttggttcagcatattcttcattaaatatgttaaaaaatattaatattgatacattgaagatagattgtggcttctttaatgaggaaggaatcacagacagagaaaaaatagttttaaggcacactatagccatggcaaaagatttagatatggatgtagtggcagaaggtgtagagacaaaagaacaagctgaatttttagtgagtttagattgtgtggtaattcaaggttattattattgtaagcctattccaagtgctgattttgagaagttactttatcaaaaataagctaattatcccactctaaatgtaggtaggatggagtagttcaacataattaaatagaagtagaaaatagtgaggatataatttttaaaaagtataatatttatggattaggagcgaagtttatgatagtgggtattataggtccttcagactctgggtttaagataaaggatgatttaaaacagatagacagtgatttaaagactaaaatatatgtaagagaaaaagtagtagatacaatagaagttatttctaaatgtgaagatgaatgtgatgctattatatttacaggatgtgcagtttatgaatttataaaatctaagtatgagataagtaagccacattcatttgtaccgagaagtgggacgagtataatgaaggcattttgggcaataaaaagtgcaaatataaaattagataaattcagtatagatgtagttgatagatatgttgtggaagatgcacttaaagaatttgatattaaagcaacgagtgtattttgtaatccattttctttggaagtaggagagtctgaacttgtagaatggcatataaaattatttgaagaaaataagacggatataatgttaactggttttggtgcagtatataatgaattaaaagaaagaggctatcctgtatttcgtttacaagctactatacaattaatcaaagaaagttatgataaggtaaagagtgaatatgctctaagcaaggcaagattttctcaaattgctgtcgaaatattgagtctaatagattataaagagaagatagataactattattctgacatgataaaaaaatcagatatggataagcttgtagtaaactatgtaagaagcattcaaggttccttatttttacttggaagaaatgattatgttgtatttgttcataaaggggtagctgataatgagtataattatgataagctattcaatctaaagagagagataaaagacatgggcttttctcttagtataggaattggtactggagtaactgcgtatcaggctgaaaataatgcacataaagcattaagacactccatagattcaaaagaaattggtatatatttggtagatgaagatgaaaatataagaggacctttagcttccgaaaatgaattaaattattctttgatgctatctgatgaaaaggtaatagaaatatctaaaaagactggaatgagttgtgagtcagttgcaaaaattattgctataagtgagaatagaaaaagtaagatttatgattcaaaagagttagcagagtatctaaatgtaagtgaaagaagtgcaagacgtatattaaataaaatagtaaatgcaggtttaggtcgaatatgtgcaaaagagactagtattggtggaggaagaccaaaaaatattactgaaatactgttttaagatattttataaaactgtataaatcattatattttataaaattctacaacaaattactatataaagtattaaagcttatcatgaaaaaaattagaacaaattattatataaaatactagagcttgttattaaaaatactagaataaattattaatataaaatactagagcttgttattaaaaatgctagaacaaattattataaaaatactaaagcttgttattaaaaatgctagaacaaattattatataaaatactagagcttgttattaaaaatactagaacaaattattatgtaaaatactaaagcttgttattaaaaatactagaacaaattattataaaaatactagaacttgttattaaaaatgctagaacaaattattatgaaaaatattgaagcttattatgaaaaatgttagaacaaattactatataaaataccaaagcttattatgaaaaatgttaaaataaattattatataagatactaaaacctatgtaaaacaactttaatatataacttataaagttgaagatacataggtttttatttttataatttaaagaggtatattatgatatttataatttaatcatatgataaactattttggcagtatcatataattcgtctatatttacatattcattaactgtgtgtacatcatacatacctagacttaatatagcacaattatatccaagattagctaatatatttgcgtcacttccaccaccaattaccattggatttggaacaacaccaacttgtcttattgcttcttcacttaacttgaaaacgtgactatctctactaagttcaaaactagggtaagacatactatgttcaaaggtataagtagtattaaatttagatgcagcatccttacaacatttttccatatgattaagctcatactctaaagtttcaggtatatgagacctaatttcagcagtcaatgtaaccttatcagttactatgtttgtagctccaccaccttctattttacctatatttgaagtagtcaatggatctattctgcctatgtgcatattgcttattgcatgagaggctactaatatagcatttaaccctttttcaggttctataccagcatgtgctttctttccatgaaaagagatttttatagattgttgagcaggagctttgtatgctatcgaaccaatagctccaccagaatctaaaatcaccatatctttacaaggcaagttgtcaggattaaagtttttgacaccatgcataccagcttcctcacagattgtaaaacaaagataaatatctctatgtggtattttttctgtagtaacatgttctaaagcttcaagtatagcagctattccagctttatcatctgcaccaagtgtagtagttccatcacttctaactacattaccatctagtattggttttacacctaaacaaggttgaacttggtccatgtgtgcacataaacaaagtggtctacttccttcttcaccttttatataggcaatgacattacctgtattaccaccatatttttcacctgcatcatctataatggcatctatatttctttcttttaagtagtttaccaaccacttagacatttctaattcttgattagatgggctatcaattctaaccatatccataaaattatttataagtctatttttatctaacataaattatttctccttttagaaagatttaaataaattacatgctatatgaaggaagtattccaggtcctagtggaatattaaataccataaacaatattaatagtatagtccacactattaagaatgatatagagtatggtatcatattagcaattacagtacccataccagcatctttatcgtattttcttgtgaatgctagtataatagggaagtacggaaataatgggctaagtggatttgttatacaatcacctatacgataagccatctgagtaagtgctggattgtatccaaccatcataaacattggtacaaatataggtgcaagaatagcccactttgcagatgcactacctataaataaatttataaaacatgataatataataaatcctatcaacaataaaggtccatttattcctgctgattttaaaaattctccgccctttacagctagtatcagacctaaattactatttgtgaataattgcaaaaattgtgaagcagcaaatgctagtattatatatccacccatatcactcattgcactagccattatagagactacatccttatccttctttattttacctatagtttttccgtatacaacaccaggtatgaaaaatgctagtgctattataggtaccatacctttcataagaggagcattgtttgatagtaaatctcctgtttctgggtcagctaagaatggttttttaccgattacactaagagctactataatagctacatatattaatatacttataccagcttttttaagccctttcttttctacatcactaagacttccatcaacatctagttctgcatttccttcatatttaccaaatctaggagctacaattttttctgttacccatgttgccaaaagtattagaacaaaagttgatgctatcataaaaaataagttcattgttgcattggcttgaaatccagaatcaatcatttgagctgctggaactgtaaaacttgcagcaagtatatcattgacacttatcataatgtttgcggcaaatcctagacagactgctgcatatccagaaaataaacctataagtggatgtctaccaacaccaagatatacaagtgcagctaatggtggaaataatattgtacctgcatctgaagctatattggcaagcatacctatagtcattacaacaagagttactcttgtttcaggaatcttgcttactgatgctttgattgttgctgtcataagtcctgttttgtcacatacaccagcacctatcatagttactagaactagacccaaaggagcaaacccttggaaattgctaactatgtttcctaaaagaatttgaagctgttctacagtcaataaatttactgcagttatagtttctccagtaccaggatgaactactgatatccccatagaaccaactagactagatagtataagtaaaagtacacataaccctaaaaatattgtaactgggtctggtagtttattaccaacagtttctattctgtttaatgtcctgtcaaaaaagtttttcttcttaactacgttatcattcataatatcctccctaatgtttaaaaatataattaaaaaataagtattgtggttgatcttacaatataaattctgcttgtcgatttaagacgtgtccacaatatgtcctaaaaaaagtataaaataaactttttcctgtgtcaatgcagttttctgaattttctggttgagtggtgttagttaaatatgctttaagtagattaatgacgaattatatctaatgtatttaaatagcatatgcactttaaagttaattttaaaacaaaattttatgaaaagctagtggaagattaagttattaaaataagtagcgtagtaaagtgttagattttttaattaatcaaagaaatttactttgtattttctacaaaaatctgtgaatatcttttgaattatgtagaggatataaatttattttatttacatagattagattttgttctaatttactgtattcaaatggttttccatgtccaggataaatcattttaggttttgtattgatgattgttttccaagattgaataaattctagtttgctttctgcaaatatggtaattttgtgagtacttggaaatccattcattgcagaatctccacaaaataaaacaccatcatcaattagtagtgaaattgaatcagcagtatgtcctggtgtatctataatttttccatttagttctttttcaatttctttacgattcttgtcagacacaagaatacaccttttttcaaattcttgtttaagtggagaaaaactatgctcaccttttccaaatagtttcataatttggcaaaagagaaaggcagtacggctgttacaaccaccaataaaagagttttgacctttatatagaatttctaaagctttatcatgcataacaatctttgtattaggagattcgtctagaatctgatttagaaaaccaacatggtcatcatgagcatgagttagaaatatgtatcgaatatctttgatttttatgttgaatttagaaattcgttttttgaaatgtttaaaaccattttcatatccagtatcaatcaagacaaagccatcttgaatagggtacaaccatgtatttataattcgatttcctgcattaaacattttttcaccaccttgaattagaatataaatttatattaattagaaagaatatagcatagttctactgatattttaacgtatctctaaaagttttaaggaggataatatattttagtttaatctaaaagctaaaagaaaagaagtatactgttacaaaaacaaagagtggtataacttttacagtagataccaccctattataaaaatagacttataaagttttatcgtgtttttctaggaatgttagatattcttctttagtcataactggagtaaaggtatctaatatatctttagcatccttagcattatcaaaaagaaggtctacaactgtaagtgccattgctttagcaggaattatgtaagctaaatcttcatcaactatttcaaaatctcttgtatgaagagctccttttacaccaccaatcatagggtgaagagtaggcattatatgagacacatctccaaaatcaaaagagcctgtaaaatctccaccatcaataacttttccttttagacctaaatcttcaagattgtttttaaataaattatcaagacttttgtatcgtaatattggaagatatccaggaatttcagttatctcaacatcagctccaactgccattccaccagccatcaaagccttatttattctttcattagcatcaatcataccatttatagttctagctctaacatatgattccatatgaacatcagcaggaacaacatttactatatctccaccttttgtgatgatagggtggaatctaactctttcagactctttaaaagtttctctaagtgcattcacgttgtttatagcaagcattgctgcatttaaagcatttattccatcatgtggagcagaaccagcatgagattctttacctataaatttaaccttttttccaacaaatccattactctcaggaccaactagagccttatcttctcctaaatcagaagcatgaaacatcatagatatgtctatatcatcaaaataacctctttttattaattcttgttttccaccaaaataagttatttttccttctttttttaattgctctctgtattccaactcaataaactcttcagcaggagtagccataaaagatactttaccatctaaatgttctaaaacgccactttttactaaaccaacagcagcacctaacattccagctatttgaatattatgtccacaagtatgagaagcacctatttcattagcatctttatgttctttacatgatataccatccaattctccaagtatagatatatgaggacctttcttgctagaatttgcatctgctttgcatcctgtaactgctatatttttttctacagataaatttaattcttgctcaaaaaagtttgaaacagcttctgtagttttaaattctttatatccatattctggatttttgtatattccttgacctatttttaatattttttctctattttcatctatagtttttattactagagattttaattgttctttattcataataaattcctcctatattttaccttgaatacttaaaactatatgagctatactcgcacatgcaaagaatatagttgtaaatacaataagtgaaattataactattttccatgacatttcttttaaagcttctattttgtttccaacagaaattcctgcaaaagctagtagtggagtagttatagccataaagttaatattattagtgttagttaagaatacttcagatgttggactatatggcatactaagtaaaaggccgattatagttgcaaatccaaaagctggaaagattgatttaggaaataaatcttttataatcatagctgccatagcagctaatattagcatcaccataccaggaagagctgtaactatagatgtaccaacgctaattctttgtcctataagaattataactccaataacagacataaccaataattgatatgaacttttctttaaatttaaattagcaaacatttattagcactctccttctgtagatttaatttctttagtttttttatttctcgaaaatttaggttctaaaatcttatacataaaattagtaaatggtaaggatacaaaaactaagaatataattcctgttatactagacatcatattgcttgttgcagcataggcaagtattgtatctgccatttcaggtggtaccatggtagataatgaaccagcagctgctgtcatcatacttccactaccaacaccacaggccattcccaaagcatatgggtgaagaccactataaatagatattgaacctagtacactaaagtatatagtaccaagaactgttcccattaaatatgtaccaagtacaccactaccttctggtgagtttatcccatatttttctgatataactcctaaagaaggttcacgacttatacttgcagtagctccaacagcttctcttttcattccaaacattaatgcaagaggtaatgcaacgattggtgcaagtatatgaccaaattcttgagcgataaatgctggtccagcttgaattattttgtcaatgtttggtccaactgtagtaccatattttataccaagcattactagtgcaattccaacaacttcaccagcaatatttatttctttttctccaaccacttttttaagtgctttaatttttttacctaataaatctggtgttattataagtccaattataactgcataaagcatagggaacagtactatagaggcttttccaatagctatagttctttgccctataaattcacatattactaccaagattaagcaagttaaaaatacttgaataaaatgttttttattaatttccatgatttcctccccaaaagaataaatattttacttatctgaaatgagaaaatacgttttcttaagtataatacgttttcctaaataaaatgaaaaaactatttcaaataagtttcagaaatgtcaataacatgtccttaattaaggataaaacaaaaatttaacattgtcaacgaaaaatatctaaaatattacatattttgaatatattgtaatatagctttattatgaaaaaattgtttaaatattgtaggaataatagctaaaaagctttaaaattagtaatataaaattgaaaaataataatatagagttgagaaatagtaaattgaaattttaaaataaatgagtggaagtagcttagtaaagtatggaaatgaatattacaatagaaaataaataatatgtaaagactttaaattaattttaagtattaagtacaaatactaatttttgatatagaaattgaataaagtaaatgataataagcaaatgaattaagatgataataagtgaattgatatagaaataagtaaattaagtaagatgataacaaatgaaatgataataagtgaattgatatagcaataagtaaattaagtaagacgataacaaatgaaatgataataagtgaattgatatagcaataagtaaattaagtaagacgataacaaatgagatgataataagtgaattgatatagaaataagtaaattaagtaagatgataacaaatgagatgataataagtaaattgatatagtaataaataaattaagatgataatatccaaagtgagaaagataatagaaagtaaataaaatcatgtaagaataatttagataagattctaagattttatttatttaaaaattagtatgattaatttagattaaataaatttaataattttagtaggtggtaatgaatgaaaataaatagattaacagaaataatagtaattctattaaataaaaaattagtaacagctaaagagttggcagataggtttgaagtttctacaagaaccatatatagagatatagaaactctgtctatgtcgggagtaccagtatatatgacgaaaggcaaaggaggagggatatctttaatagaagaatattctatagacaaggccatactgtcaaaaaaagataaagagagtttaatagttgcactgaaaacattacaggcgactaagtatccagaaataaattcagtagtaaataaaattggctcaatatttggagagcagaatttttcaaactggattgaaatagactttactgaatggggaagtaattttaatgaagatgataaatttacaaaaataaaagaagctattttaagacgtaatactataaattttaattatgtaaatagtttgtcaagccagacaaacagaactgtcgaaccactgaagcttatgtataagagtaagacttggtacttgtatggattttgtaaactaaaagatgattttaggatatttagaattagtaggataaggaatttatctataaaggatgaagtattttcaagaaagataatagaagaagtatgtttgaatgattctaaagtaattaaggaaaatactataacgttgaaattgaggtttaaagaaaagatgctttttagagtatttgatgattttaataaggatttaataactaaaaatgaagatgatacatatgatgtaattacagaatttcctattggtgaatggatttatggatatattttatcgtttggtgacaatgttgaagtacttgaacctaaagatgttagggataatgtaataactagactaagggagttgtctaaaatttattcattataatatgatgctagattaaagattttattaaatatataatatcttgcatttagtatataatatctcactgagtttaattatattaaaaatatgacataaaggtgtcgtatattataaattataattgaattagttcaaaataaaatatattaataaaaacaaagtgaggtataaagtatgaattatgaaatagtagagataaatgagaaaatagttataggaatatcgaaggagactacaaataaagatggacaagcggtaaatgctataggtgaattgtggaaaaaatttatgggcaaagggatatataatgctataaagggtaaaaagaatgacaagacaataggtctatatacagattaccagggtgattttacaagtccgtatagctttgttgcatgttgtgaagtaaatagtaattctgataaagagaagaatttagaagaattaaacactaataatactgttggagaaagtattattagtaaagttatactagcaggtaagtatgcaaagtttgttatagtaggaggtcaaaaagaagtaggagatttttggtttaagttttggcaaatggattttgataggacttatataagtgattttgaagagtatcaatgtaatacttttgatacaaagaaacaagaaattcatatttacataggaataaagtagatttgttattactatattgaatgaagtattgagtatagtacatttattatagatagttttactatttataactataagcagtaaatctgtaaaagatttactgcttttttagtaattaatagtatcagtatcactttgaatcttcagacatattcgtcatttaatattgtttattgataaatgatacttgtaaatataatgatttgttatttaatttaaaatatgaaaaaaagtattataaacacattagaatacttctggatttatgagtatacaatttgaaaaatataaaaaataatgtataaagctaaatctaatttaatcgataatacatatagagaaatataattaagtaaataaacaactatctattagatattgagaaagtcaaatcctatatgaatctacagaaatgattttaatgaatctgaaaaaattttttatacaaacataaaaaaggtataaagttgttttattataatttgattacttttgataactttttatgttttatacaattatatttttaataactcgtcaaaacgccaaacatatattacaatagatatataagtttttttgttgacaaattatgttaagagaattaagtataatatggcataaataattacttttatttatcaatgaaatgtatttattgtgtagcgaaaaatagtcagatagtatagacaataactgaagataaaagcgtttattgttgtacatatggaggagttagttttatggaaaataaaattttgatagtagatgatgctatttttatgagaatgataattaaagaagctctgagtaaaagtggctataataatttaatagaagcaaatgatggagaagaagcgtgtaatatatttaaatatgaaaagcctgatttgatgttgcttgatattacaatgccaaaaaaagatggtttagaggtgctaagagaaataaaaaagttggattcaagtgctaaggttgtaatgtgctctgcaataggacaagagaatatgattgtagaagccataaaacttggagcgttagattttatagtgaagcccttcaaaacagaaacattagttaaagttgtaaataatgttttaaaataaaagtgtaaatatacactgatacaatgaaaagcaaataaatgcaataataaaagggaggggtttatattataaattatttagaacttgatgatgttcatatagatgctcttagagaaattggtaatataggctctgggaatgcaattactgcacttgcatccatgataaatagcaatgtagaagtattaatacctatggtcaagatacttgaatataatgaagcgacaaatttgcttggtggtccagaaaacaaagtagtatgtattttactcgatatgaaaggtgatatcaatggaatgtttatgtttttgttggatgaatcaataactcaacttatgctaagttctctttttaataaagaagaagcttttttagatgagattgaggcaattgaaatttcagcaattaaggaaataggaaatattatggcaagttcatatgtaaatgctattgcatctatgttaaacatgactataagtgtttcaattccagatatatgtattgatatggttggagctgttctaaatgtgcctatgataagattttcagatgttggtgacaaagtcttatttatagaaaataaatttaaaatgagtgataattattttactagccacattttgatgattccagaaatgagctcacttagagaaatactcgtgaggttgggattagaagtatgaatagagagatagtagtgaacattgcagatatgaagatagcctatagaccaaatgttttagttacttatgcacttggctcttgtgtaggagtatgtttgatagataaagtagctggaattggtggaatgttacacgttatgttgccatatagtaaagatgctattaacattgaaaataagtgtaaatttgctgacacaggaataaatgagctcattaaatctatggagaatataggtgcaaatagaatatatataaaagcaaaaattgctggaggtgctcagatgtttttaggaagcagcaattcagtaattgcaagtataggacataggaatgttgaggcagtaaaaaaaactcttttaggattaaatattccaatattagctgaggacacaggtatgaattatggtagaacaatacgtttttacactgagacgggtgaattacttgtagattcaataaataaaggtaagaagaaattataatatatatttcatagaaagtgtattttaggagggaggtattaaatgagatttccagatgacccatatttagattatggactaattgatgaaggaattaagtatctaaagtttaaagtagatgagcaagattttggggttgaacttgaaaaggtaatagaaattactggaaatcaagaaattatatttattccagaactacctacatattctaaaggcataataaatctaagaggaaaaatcattccaataatagatatgcgtttgagacttaaaaaagatgaattaatgactacaaattgcatgtatatagtagtaactgaaataaaggacttggtagttggatttgtggttgatagagttgatgatatagtaagcttagaaaaaagtaaaatatcacctccaccaagagttactatagaatattcggattattttgtaagtggcgttggagaattagaaggtaaaataattactttactagatttagagaaacttttgacagataaagatgaagttttaatagatgaattaatcaatgggtttgattgcactatcatgtaacatagggatgtagttggagtgttattataaaaagattgtgatgagaacatttaagaatatagtggtataattattaagtataaaaattttaaatcattaaaatttgaatatattatgtttaagagaggtttgtatatgaaaaataagcaacagggaacaattttagtcgttgatgatagtgttctgatgtgtgacttaatagataaaacacttacaaaagataattttaaggttaaaaaagcatttaatgcaatagaggcaaaagaatttattgaagaatttataccagacattattttgcttgatataattttaccagataactctggttttgagttttgtaaggaagtaaaatctaatactcgtacagcagatatacctataatttttataacttcaaaaaatacagatacagacatagtaaaaggatttggtgtaggagcaattgactatatggtgaaaccttttagtatgacagaattaaaagctcgtgttatagctcatcttgaagtaaagaaatctcaagataaattaaaaaagataaataatgaactggaatcttctcttgaaaaattgaatagactcgttgtaagagattatcttacaggtctttacaataggcgacatataattaatcagcttatggagcaaagaagaattaataaatatagtgaaacatcaatatcccttatccttggtgatattgatgactttaaggttatcaatgatacttatgggcatgaagcaggggatttcgtgttaacagtaatatcaagtataataaaaaagaattgtagacaaattgatactgtatcaagatggggtggagaagagtttttgataatgctcacaaatactccaatagaaggtgctaagatactttcagaaagaatccgtaaagagataaaggagtttgatttcaactataaagaacataaaataaagtgcactattacattaggagtagtagaagtaaactcaaatatatcattagaagaaaacatatccttagcagataaagcaatgtatgagggtaaaaacttaggaaaagattgtagcgtagtgagtacaatgaaaggattaaaaaagatataaacttactttatgaaggagtacagatatgaaaagagaagtaaagctttctaaattagcaattgtattgctgattattatagtattggctgttctagcagggattttttcttctatttcatcttataaagcatttgaaaaagtagaaaaaagtattaatgatatgaataatttgaggactcaaagtcagtatataaaagatacaactagagagataagtgatgtattaagaagatatgtatttacaggagaaaaaaagaataaagatatttatgaaaaagaattatacggaaaaacaagagaatcagctttaaacaaattagaaaaaattggtcttacaaagagcgagtcaaataaaatcttagaagcaaaagaaatatcagattctttagtaccaacagaacaaagtgcaataaaggcagtcgaaagtaatgataagagtaaagctcaaagtataatttttggtagtgactatataaactcccaagagaaaatggattctttaataaatgaatttcaagaggatatagttacccgttcaaattccaaaattgtagaagtaaaaaaagaattacaaagtctaatattaagaacaatatttatactttcccttttaataatattgacaataatagaatatacagtaataaaattaaagatagtgattcctattaatagagtagaaaaacacttttcaagaattgcatctggggacttaagaacaagtatagacgttgaagaaagtaaatctgaaataggactattagtgagttctgtcaaaaagatgcaaagtatgcttttaaattacatagaccttatagacagtacattaactagtattgcaaaaggagatttaagagtagagatagaccaagaatttataggtgattttaaatcaattaaaatatctttagaaagtataataaactcttttaatggtgatttttctgaaataaatttatcagcagaacaagttgcaagtgcttcagaacaagttgcagcaggtgcacaagctctttcacagggtgctactgaacaagctagttcagtagaagaattagcttccacgattaatgagatatcagatggaattaagaagtgtgcagatagtgctagtcttgcatgtgaggtatctgaccaatctgcatcacaagttggttttggaagtagatgtatggatgatatgatgacatcaatgggtgaaataagtgaaaaatcgagtgaaatatcaaaaataatcaaaacaatagatgagatagcattccaaactaatattctcgcattaaatgcagctgttgaagcagcaagagcaggtcaatatggtagaggatttgcagttgtagcagatgaagttaggtctttggctggtaaaagtgcaaaagcagctcaaaatacagctattctcatagaagaagctattaaaacagtagaaaatggtgtcagaattgctaaagagactgcaaatgcattggacttggtagtaaatggtgtagaaaaaactactaattatattaatggtatttcttcggctgtacatagtcaagaagtagcaattacacagattttatctggaatagagcaaatttccatagtagtccaaatgaactcagcaacagcagaggaaagtgcagcagcctcagaagagatgtctgctcaagctcaaattttaaaagaattagtagaaaaatttcatctaaaggaaagtgaagtaagagaatcatcatgggtttaaattatgaggtgaatattgaagtaagagaattatcatgtatttaaattatgaggtgaatattgaagtaagagaattatcatgtatttaaattatgagatgtatatatattgaaataagagaatgattgtgtatttaaattatgaggtacatatagtgagataagagaatcatcaaggatttaaattatgagatgcatatataatagaaaattatttgtaggtcgtaggtgataaatgtgaattatattgaaccgagtatgagacaaatgttagatatgtttatatttgagacaagtttattactcgaacaattagatgaaattatgattcaaatagaaaaagagaaagtatttactcataacaacattaatgaaacttttagaataatgcatacgataaaaggttcagcatctatgatggggttagacaatatatctgctttagcacatagtgtagaagacttgttttatgctatacgtgaaggtaaaatagaagttttagacaatgacctattatttgatttagtctttcaatcattagattttataagaagagatatagatgagctacaatcaagaggttgtatatcttctgattactctaattttattgaaggaattgaagagtatgtgagtactttggaattatcaagttctatgaaatcaaaggataatgcaaatttagaaagtacagacgaaaaagaagcaatcgattcaaattttgaatacaaagaagactctgatgtagtaaaaataatctttgaacaaggttgcatgatggaaaatgtgagagcgttcatgcttgtatttgaacttagagattactgtgaatttatagatttttatccaaaagatgtagaaacaaatgcagagtctacagaatatattaaaagttatgggttttatatacaatttgtagctaaagaggataaggcaatagtttataaaactatagaagataatctctatgtaaaagaatacataaatattagtaaaaaagaaatagaaatgaaaaatacatcaaataatgatgcagtagaaaataaattaaaagataataataaagtaagtaaaagttatcaaaataactatacagaagatgagatacaagaagatgttttaaatgaaaaaactgatatggaaaaagatagtctaagtgaagaaaatgaacatttaccaataagtaagcagagtattatgagtgtaaatttagaaaaattggatttacttcaaaatatagttggagaaattgtaattatggaatcaatggttgtaaatagcgtaaattctacaggtgttgatatagataatttcaataaggcaacaagacaattacacaagcttacagatgaattgcaagatatagtaatgtctatgcgtatgattcaaattgctggtgtatttcaaaaaatgcatagaattgtacgagatatgaataaaaaattagataaaaatgtagagttaataactataggagcagagacagaggtagataagaatgtaattgataatttagcagaaccttttatgcaccttataagaaatgctatggaccatgcaatagagcctattgaggagcgtatagcgaaaggtaaagaagaagtgggaaagatagttttatctgctgagaatctaggcggagaagctgtgataagtatttcagatgatggtagaggcattatgagagataagattttggcaaaagctaaggaacaaggtcttcttaaacatcaaattaatgagtatactgatgacgaggtcaattctttgattatgactccaggtttttctacaaaagaatctataactgaattttctggaagaggagtaggcatggacattgttcgtaaaagtattgaaaaagttggaggttcaattgaagtaaaaagtaaacaggatgaagggacaacctttactataaaaataccattaactctttctatagtagagggtatgaagtttaaagttggagattcactatttactttaccaatatcatccataagaagaacatttaaacttacagacttaaatcaaataattacagaaggaaataagacagagttaattacaatatatggagcatgtattcccattataaggttacataaaatatataatattcaaacaaaagtaaccaatctgatgcatggtaatatgataattattgaaaatgagcataaagcagtatgcatttttgttgatgaaataataggtaatcagcaagttgttgtgaaaccatttccagtttatttcaaccgatttaatataaaaaataagggtttatcgggatgtacaatacttggggatggaagtataagtttaattatagatgcagatagcattatagaaatatattaggggatttaaagtatggctaaagatgaaattattaaacaagtattaacattttatgtaaatgatgttatttatggaatagaattagaaaatgtgattgaaaccataagatttcaatcaataacgtatgtaccatgtcttccaacatatataagtggagttattaatttgagaggaagaataataccagttattaatatgcatataaagtacaatcttcctaaagctgattataatgagagaacttgtataataattacaaaggttgatgagtatcaagttggaattattgtagataaagttgttgatgttattcatatagaaaatctaaatttactagagacgactaattctaacaacactaatattaataaagatataaaagagattgcgaaagttgaagataattctatattaattttagatattcgaaagtttttgattaatagcatatagttagttctgataaattagcaggaggaagtttttgcatgataaaactcacagatgaagaatttatagttcttgtaaaccatgtaaaaaaagaatatggtattgatttaagtaaaaaaagagcgttaattgaaggtcgcttatacaatacaatgatagagaaaaaacttagttcttttagtcaatatatgaatctattatttaaagataagacaggaaatgaagctataaacctaataaatagattgagtactaaccacacattttttatgagagaacctcaacattttgagtttatacagaatagtatacttcctttttgggaagaaaataataaaataagaaacataaatatatggagtgcaggatgttctagtggagaagaagcgtattcaatagctatgactttggatgattattttggatataataaagagttgtggaacattaaaatcatagccacagatatttcaactaactcacttgaaaaagctaaaagaggtatatacatagaatcaaatgttaacaatgttcctgagttatggaagaagaagtattttatagacaacaaggatggtacatttaaaatttgtgataagattagaaaaagtgtaatttttaagtcatttaatttaatgaatgatttctcatatcaacattttgatttgattttttgtagaaatgttatgatttattttgatttaaaaacaagagaagaacttataaataaattttataatgctaccaaaaaagatagttttttgtttgtaggacatgcagaagtaatcaacagaagtagtactaaatacaaatatgtaaaacctgctatatataaacgataaaaaggtatttttgatatatgattttttggaggcggtaatgtggaacgttttaataatatggttattgctataggcgcatctgtaggtggtacagaagcaatacttgaaattataaaagacctaccaaaatcaacaccagggattgttgtagttcaacatatgccagctatatttacttatatgtatgcacaacggcttgacaagcagtgtattatgaatgtaagagaagctaagaataatgatagagtcgaacaaggaaatgtgttaattgcacctgggggttaccagatgaaattgtgtacggataaacaaggatattatgtaacttgtgaaaaaggagaaagaataagtggtcactgtccatcagtagacgttttgtttgattcagtagcagaagtagcaggtaaaaattcaataggaataatacttacaggtatgggttatgatggagcaaatggacttttaaaaatgaaagaaaatggtttatttacaattggacaggatgaaaattcttgtatagtatatggaatgccaatggtagcttttgatagaggttctgttatgttacaattacctcttggtgaaatttcaaactgtttgataagacatattaatattttaaaacaaaaagattaattttttataaataaaaattaatcttttattaaattatatggataaaaaaccctagaaactccaaatataataagagagatttatatttaggaggaaaatgataatatgaaattttttaaagtcgatacaaaagctaaagttttaagatatgtatttgttttaacattgactataatggctgttttggcaattaaacatgactataaatataataatttaaggaaagatgcttcaattaatttaaatagtaataaggaagcagtgactgttatgagtaaccagtcattaccaaagggtaatacaaatagtaaacaaactttatcagtaagtacaataggaagtaaaacaatagtgaaaaatgatgagtatttagaaagtactataaacatgcctgtaataacaaattcaaataaaattgttgaaaggtctacaaatgataagataaaaaatgacatatttgaattttataataaatcatataaagaagcaaagcagtatcttaaggataatcctgacgagaaaaataagtttgttgcaaatgtagactttgaacttaaaaagaatactgattctgctcttagtataaaagtgagatattatacttatagtggtggagcacatggattttatcaagatatagcatataatgtggatatgagaactggaaaatttttagaattaatggacttatttaaggataatactaaatataaagaagttatagatgaagaaattaaaagacaaatagctgaacttgaaaaaaaggatgaagaaaatatcggaatatataattttaaaggtataaaagagaatcaaaacttttacttgcaagatgagaatctagttgtatattttgatttatatgatataactccatatgcagcgggaataccagaattttcaataaataaagcgttgataagttctatgctaaaaccagagtatgtagatttatttgatttgaaatagaagattaaattaaatgttatgctataatatttagcatagaaacttattaaaattgggggtataaaaatgctacttttaaaaaaagacgacataaaaaaagtatttacaatgagagatgcaattgaagctgataaggaagcttttagaatttattgtgaaggaaagagtgtaaatcctttgagaaccaatatatctgttccaagtcaagatgctagtatgttatttatgccaggatacgtagaagaattaggctgtgggggaataaaaattgtatctgtatttcctaaaaatgctcaaaaaggcaaaccagtaattccagcaacagtactattattagatggagaaactggagaagttagtgcagtattggatggtacttatgtaactcagattcgtactggagcagcctctggagcagctatagatgtattggctaaaaaagattctaagattggagctttgataggtctaggaggacaaggtgagccacaacttgaagccatgatagaagctagaaatttggatgaggtaagagtttttagtagaaacagggaaagtagagaaaaatttgcagaagaaatgaacttaaaattaagtaaatataatactaaaatagttgcagttgaatcatctgatgaagccatagataacgcagatgtgatagttttagctactccatcaaaacaaccagtacttaatggaaacttagtgaaaaaaggagctttaataagtgcagtaggttcatatatgccagatatgcaagagttgtgcccaaactgtttaactagagcgtctaagatattttttgaatcaacagatgcagttttatctgagtcaggagatatattaattccattaaaagaaggtaagataagtaaagatgattttagtggtgatttaggaaacgttataaatggaactattcctggaagagaagatgatgatgagataattgtatttaaaactgttgggataggtgtacaagatgtcgtaacagcaaaaagaatatacgataaagcaaaagaaaacggtattggaatagactggaagtggtaaaatattcaaaataattctatagttagacaaatttatgttataatgttgataaataaattttttattattttaattgagggaggatgtttgtatgaaaatggtaaaaaagttaatattgtctacgattatggctctagttttagttctaactatagggtgttctaatgcagaagaaaaagtaaagtcgaattttgaagctaatttagctgcattagaaatgtataagtatgatgaaaaaggaatttctgatgcattaacagaagctgaatataaacagattcaaacttataacagcaaggacaaggtttcaatgattgctcaattgacacctctttatggtaaagaaaatgctgaaaagatatacgaaacaattgttaaattaattcaaggtgttgaaaagacagtaacagtggaatcttctagtaaggataagataactttgaaagttgtaagtaaagctttagatactagtaaagtaatgagtgaagcgaacactttagtaaaatcttatgtaactgatgaaaagaattacgataaaaaagaaaaagaagttcaagatgatatgacaaaaatgattatagacctttacaataagaaaccaactaaggaagttacaactatgattacatatactaaaaaagatggtaaatggcaaccacctagtaatatacaaaagttatgtgaaggaatatatacaatttaatttattttaaagacacaaaactatcttttaagcatataataaaatgtttggaagatagtttattttattttcaaagtataaattatattttataaatgatttattttataaataatttatcttgataaatagtaaataatttactttactaataataaataatttatcttaccaattaatttactgtattaagtaatttttttattaaataatttgtttactaaataaagtacaattaatagaaattattttattacttgttgaataattaatcaaatttatttgatgtatttggtaatgttgactatataaaactagtaatacaattatggcatatcttgataaaacatggtgaataattgtatcttatatagtcgaaaatatgatatattaatattatacgttaaaagattatttatatttttaaaagtttttttataaaatgaaaggggtgttttttatggtatcaaggcaagaattaaaacgagtatctaaagctcagttatctggaaactggggaatatgtgcaatttctatggcagtatatattgcattgatagtattaatatcaattgtaggattaccttttgaaccattgactactattgtagtggctgtaatagctttttgcgtttcagcaggatttacatgtatgttcttgaaaattactaaagatgaaaaagtcaagataggagatatctttgtaagtgggagaatttatttaagaagttttggtttttatttatttgaatcaattattgtttatatttattcttttataatcacaattataggagcgtttttatcatttggagttttacttactagtggagcaattgaatatttatcaagtgataatgttggaatagggactattatttctactggaataactctagttcttataatacttgttcttatgttaccggtttatatattgctattatatgtttctcaagctactttcttaatttgtgaagacaaggataatatgggtgtatttaaatcaatgggtgctagtttagatatgatgaaaggaaatgtacttaaattatttgtactaaactttagttttataggatggtatatactttcaatagctactcttggaataggtctactatggctaattccatatgtaggtgttactaattgtaatttttatagacaattagtaaaagaaaacccagatgtagaggatatactattagataaagaaaaatcttatactatgtactaagatagatagttatacatttaaataaaatatggctttaattaaacattaaagtataacattgataaaactgtcttttataagaattttttaaaaagacagtttttattattaaaaaataaatgattgacatagtatagactactatgatagttttttattatagtaatgactattgtgataactatatttgaggagcgattttatatggagataaaattatttgattcagaacttaaagtaatggaagttctatgggagagaggagaaagcaaggctggagagttagtaaaaattttaaaagaagaaacaggatggaatagaaacactacgtataccgttataaaaaaattagtgtcaaaaggtgcaatagagagaattgagccaaattttgtttgtaaagctttaataagcaaagaggaagtacaaaaacaggaaacagaaactttaattaataaaatgtttggagggtcttcagaaaaatttctttcagcttttattaataaagaaaatctttcaagtgatgagattacaaaactcaaacaaattgttgaaaaattaaagtgaggtaagatttatgttcattaaattgttagaaatgagttttacttctggagtattacttttaatagttatttttataagagcatgtttatttaaaaaattacctaaaaaggtatttgtattattgtggttgattgttttatttaaacttctaataccagtaagtttaaattctggttttagtatttatagtataattgaatcgacttttgatgtagaattgggtaatacatcaacagaaaattatactcttaagaaagctagtgactctacaggtaaaaacaattctgacgaatttgaaataatgtctaatattgaaaatattatgatgttggaaatgttgggcattttgtcttttatagttactattatgtttagcatacttttatgctttagatattttaaaataattaatctttttaaaacttcaattcatataaaaaatcatgagttcattaaaaaatggatgtgtaagaatagccgttttagaagatttattgtttgcatatctgaatttactaggacaccacttacatctggtattttaaaaccacgaattattttgccaaagcaaatgaattatgctaataatcaaactttagactttgttttaactcatgaaatggttcatattaatagctttgataatctgttaaagttatttatgcttgtagctcttgttgtccattggtttaatcccttagtttgggtgatgttttttttactaaataaagacatagaatttagttgtgatgaaaaggttatgagtatacttggtgaagaatatagggctgattatgcaaccacactaataagtctagcagaggagaataatccattttcaatgacaatatgtagtggatttggaaagacaaaaatagaaaagagaatagttaatattatgaaatttaaaaaatcaacttatgttacttttttagtttcaactgtattagtttgtgggacaggtcttgtttttgcaacagaaaataaagagattaatgaggttgaatcttttggtttaacaaaaaatgaacaaagtgataaaagtggattttcaataagtagtaaatcaactgatttatattctcccaaagtagaatctgatattcttgttagtaaagctaaaagtgatggagagactcattttagtacggcaaaagtatctgtaattgaatttagagagcatgaagaatcatctatgagcaaagtaactaattctgagaatagtgaagaaacgtatgtaaataaatctagtaatagtaaggatgtactttatactgattcaggagaagtttcaattgagcaaagtaactataatgataatcgctttgtcatatcaagaaaagggaatttgttagcagttaataaagaacaatatagaacatggatagagtaaccataaatcttagtaatataaaagatttagaattaaaatactatctcaaaataattaattttgttttgagatagtattttttattgaaaagttttttaaaaagacttgacacaaatatgactactatggtagtctaaagatgtggttgataactattgcaatagtcattttaaactacactacccaaataaatctctaagaaaggaagattggttatgaaaataaaaaaatcccttataagtgcaatgatggtatctgcaatggtactaggaggaactggagcagtatttgcaaatggaaatgattcatctaatattgctttacctaaacttgaatctctaataaaatcaggaataactgaccctactgaattggaaaagtatggtgttgagcattatacttatgaagagtatgctaaacatattcaagaattaaaagactatgctaaagaccctaatgcagtcaaagatgtaagtcaaaaagaccttgaggaaacaattaagaaaatggaacaagaattagaaaagataaaaactgaaggattaaaaattatgaagcctatcactatagaaaatgaagatgggtctcaaatttcaattgcttacaattatgcagcaattgactaatgttaaatataatctctaagatatttcaaaatcctaagtaagtatgattaaatacattaagctactgtaatgatataaacatgcagttgatgattatttaaataattatcaactgcactacccaaataacacttaagcttgttaaaattatgtaataaaagtatcaaagaatttagacaaatgtaattgaacatatggagtgagaataaaataaataagactcaaataagtaataaaaaaataaagtctaagttaaaaataaagtaagaagtagaataaaagtaaatcgagtcaaagtaaaagtattaaaccaaatttataatgttaacattttttaatgtatgttaagaaatgttaacattatttttttttcttaaaaataataattgaaacattctgaaaaatataacgaaaattaaatattatctattagattcattaaaagttaaagaaaattagcattttaggatttttaagatttgtttaaaaaaatcaaaatttattggcatagtaattgcttaatacatagagtaataatatgattataaatttattgattaattttattattatttttaaggggggagagtatttgtagttataaagcatattgggaataatgaaaaaggttaaaaacatattactataaagtatagggggtaggttaaaagagtaatcataaaataaatatacggataatagtagataagaataccagaaaaaaatagatagttaaagggttagggtgaaagagtaatcgtaaaataaatatatagataatggtagataagaatatcagaaaaaatagataattaaagggttagggtgaaagagtaatcgtaaaataaatatatagataatggtagataagaatatcagaaaaaatagataattaaagggttagggtgaaagagtaatcgtaaaataaatatatggatgatggtagataagaatatcagaaaaaaatagataattaaagggttagggtgaaagagtaatcgtaaaataaatatatagataatggtggatagagtagtaagaaaataaatagataaagggatagaataaatttaaatatggaaaatgaatatctaataataagtgattaataaataattgtagatagattgtaaattaaataaatctttaatagaaaggagaactatttatatattaaatagtatttataaatatgaaaaaaggcgattttatatggagtggagttcttatttgtattattgctgtcttagcaataccaagtagtagagaagtatttatggaagcaacaggtgcacatccatatattgggggttttttaaagtttgctgtattagctacaatgggagatttacttggtgctagaattttgtataaggattggaaaataccagtaggagtattttatagagcaatagtttggggaataataggtgtagttaccacatatggaatgtcaatctactcatcaggtgtaggtcaagcacaagtggatggtatgcttccatttgagggaatagcttttgcaaatgctctatttaagagtgcaactatgaatatactaatgtcaccaactgtatttttattccataaggttatggactgttttatagataaaaaatatgaggttggaaaggggattaaggtaaaacttaaagatgtggtaaatattgtggactggaatgcttaccttggttttagtgttttaaaaactataccatttttctggataccatgtcatacaattgtattcttattccctgctgagtatagagtaattgcttctgcatttgcatctatagctttaggtctaatattggctttagctaataagtctaaagttgcagtttaggttcactgatgaagataatagtattatttaaattatgaataactttttaaattaatattatttatatttataataaataataatttagataagaaggaatattctaagtgatagatagtgttttaaataataaggagtaatattctaagtgagaagtagcattttaaataataagtgagattttaaataaaaagtaagcttttcgttagaatagcattttattaaacttaaaaataaatataatattttaaagaaatctaagttgctaagcactgtttttaagaagcttaaaatcccccatttaaagttttaagattctaaaaaaacaagttataactaaaaaatggctgttaagactacaatacttataagtaaaaatacttatggtatatattagttcataacagccatttttattttaaattaataattttattcaataatttgagtttatgttctaaatcaagctttaaattaaaggatttaaagaagctattctagttgtagctacataaactctggatatttcataccatgttttaaaatctactactccgctttgaggtaaaccaaagattccttggaatatcttaacagcgttttctgtatctgctccatagataccatcttctataacttttggtacagctggataagaattagatatagcatttaactgattttgtatggttctaacatactgcccagaagaaccaacttgtagtgtagtaccagggaatgacactggtacaccacttactataggtgctctttcaaatactatctcatctccatagaaatatcttaggatactctcatagtcatatccttggtcacctaagtctttactgccccattgagtcatttggtcaggacattgagatttttgtccatcacaatattgtgctaatagtggctgtcttgatgtaggaggtctttttataaaagtattaaaaatagcatctacaactacgttaattggttcaaataagtttctattatttataaacttatggtcgtatgctgttgttgaagttattgtaaagttatatcctttatttctataccattcagtaaagactctatttaaagtaaatgatattatagctattacatttgcatagattgtctgttcaggccaagttgaatatatttcagatgacgctatgtttttaatgtactctttaaatggaatccaatagtttggagctgatgaatcttctggcaaaccatcatgaactactataaattcaggcactacagggttatctaatacaacgaaaccagtaggaggtggtaatggttttaagttactttctggaatcttaggaggataagtaccatatagagtatgttctcctatgtcaaaaatcaactcactttgtcttgagaaagaacgcttacttcttgttctaggagacatgggaactccttgtcttgctacaattgtagctaacaactgcgttccttctatgacaactgtctcatatccatctgctatggcttccactatatactggctataaggtctaacatcagatggctgtagagagtaatctacatctggtgctggtaatactaaaccagtcacttgaccagattcattacttcttaggttttggtataaagttgatgagctttggctaccattagacattgaatatatgtttactactgcattttgaataggtctattgttagtagcatcaattatgcttactgttaagaaaccatcttgcatcaaatcaccctttctttaaatgaatttagttcccttatatttcaagatatgaatatagcttgaaatttgttaaataatatagatataaatttaaatttttttgagtatttgagtatatttgtatttaaataatttaaaataatttaatgtatattttagtatgtatttaaaacacaaataagctaaaaataagtagatgatataaatcataaataaatcaaaaattttgaaaggaaaataatctatgaagctagatttatttttattagcaatagttcctatattgatagggatgttttggataaggtctaaagatagatattgtagagaacccctaatccatctaattaaattttttttaataggtgcttttctaagtgttataattatacttttagaaaatttactgatgaagtttaatgtatttgaagggtattcagaactaatatatgtatcatttgtagttgcaggacttgtggaagaaggtgtaaaagctctgatactgattcctgccctaattaaagaaaaacactttactgaaaagttagatggtattatttactctgtatttttagctttaggatttgcaacaattgaaaatatggtttatattttttctgaaagtagaaatctagcactgcaagttggtattaatagggcagttatctctataccagctcatgtaatgtttgcaattactatgggctactatatttctaagtataaatttgagggaaataaaaataaaagacgtgagtatttgtttatggcagtgttaattccaattttattacatggagtttttgatttcatattgatgatagaatatagatgggctattatattacttatagtttatgtaataattttgtggaagataaatcttgataaacttgagaaatatatgaatcactctaaaaaagtgtttttcggtaatcttaggaaaaagaagaagaaataaaatttaaaggaaagacataaataattaaagtataataaatgacacacaagtaaagcagattgaagggggattatagatttgacagaattaccaaaggaatttttagaagatattgaagaaatactaaaagatgaatatgatgattttataaaaagttatgaggaaagtaagactactgggcttagaataaatactttaaaaattgacaagaaaaaattatttgatttggagttgtttgatttgaatcaaataccatgggcagaagaaggtttttattatgatgataaaattgacagacctggtagaaatccactgcatgaggctggagcatactatttgcaagagccttctgcaatgagtgtaataccaaaggcagatattaaagagggtgaaaaagttctcgatatgtgtgctgctcctggtggaaaatctacatatatactatctaagctaaacgatacaggtttattggtttctaatgaaattaatgctagtagaattaaggctctaggggaaaatttagagcgatttggagcgagaaattgtattataacaaacaccgattctaatagcttaagaaagacgtttaatgggtattttgataaggttattatagatgcaccttgttctgggcaaggtatgtttaggaaggatgaggttgccatatcagattggagttatgcaaaggtagtagaatgtcaatccatccaaaaagagattatcagagatggatataaaatgttaaagaaggatggcattttaatttactcaacttgtactttttcaagggaggaaaatgagcatgttataaatgagtttatcagtgaatatccacatgcagaacttattgaaatggaaagattatggcctcataagataaagggagaaggtcattttgttgccaaaataaaaaaattagaagaagaagaatgtaatgtcaaagaattaaaaataaaaaatttagataaagaaataaaggattatagggagtttgaaaagaaatttttaaaggttgatttttatagtaataaaaaaaataaattttatttaagaggagaaaatttgtacctacttcctgaaatatatccagatacgaaaaaactaaaagtattgagatacggtttgcatttaggggttttaaagaagaatagatttgagccttctcatgcactatctcattacttaaaagttgaagatgtaaaaaatgttgaaaacttcagtgtacagagtgaatcaattcttaaatatttaaaaggggatgttgtgaattctaatgatagtagaggatgggttttggtttcggttgaaggaatacctttaggttggggaaaagaatcttctggtgtaattaagaatcattatcctaaaggtcttagaaaagtattttaaactattagaaaaaagaagtataatatttatattgtaggtttatggtagattattttgctgtagattgacttaatatttaacacagaggagacgattttagtgggtgaagcagttaaaaaagaagttgtagaatggataaaagtgattgtcatagctcttgttttggcatttgcaataactcgttttatagtgccaacaatagtcaaaggagaatcaatgtatcctacattagttgaacgtgattatttgatagttaacagaattgcgtacaaggtaggagagccaaaatacaaagatataatagtatttaaaaccgacttaacagaggaaaatggaaagaaaaaagatttagtaaaaagagttatcggggttcctggtgaccatgtaaaaatacaagactccaaggtatatgtaaatgataagttgttagatgagacttcctatatacataataatcgtactgatggagatattgatatcgtagttccagaaggaaaattatttgcaatgggagataatagagaaaaaagtttagatagtagatacgatgaggttggattggtcgacgagcataccattttaggaaaggttctagtcagattgtatccattttctaagataggaactattgactaaacatataaaatttggagcaatcgctgattagctgaaatcaccagaccatacacaatagttgtctatataaaaaagacaacaccttatttagtagacttatctaaaagatagtgtttaagagacattatcaataaagataatataactataaaggagaatttgtgaatgaatgaaactattaaagaagagattgtagagtggataaaaataattattactgcacttttttttgcatttattataactcgttttataaaaccaacactagtaaatggagaatcaatgtacccgacacttaaatcacatgattatttggtagcaaataggatgacatataagttatcagaaccaaaatgtggagatataatgatatttaagactgatttattacaagagaatggaaggaaaaaagagcttgtaaaaagggttataggtgttcctggtgaccatctaaaaattaaggattctaaggtttatataaatggtaagttattaaatgaagtttcatatatacatgataattatactgaaggcgatattgatatggtgattcctaagggaaaagtatttgcgatgggagacaatagagaagttagtttagacagtagatataaagaagtgggattggtagatgaagaaaatattaaaggaaaagttattttaagagtatttccttttacagatataggtatttttgagtaggtgatttgtatggcagttggtatagcgtccttattgtttaatattgaggaggctttaaacatttgtgagagtataaagcaaataactcatttagagattggaattgacaatatatctgaatgtagcgagttatgtaaatataaagagagaatttctaagttaggattatctatagggatacacttgcctatggaattaaatacttgcgaaaacatagagtatatacgaaattcatggataaattttattgagaagatagaatttgaactaaaaggatttgatataaggtattttaaccttcatttgggatatgttatgacaaatagagttagaaagaatagagacaaatatttaggaaatagtgtggattttttagataaattaaatacaaattcatatgtatgtatagagaatacttattcaaaaggtggggatttttcaaatattggaaatatatcttatgattttgaatatatatttaagaggattaaaaattctaagatttgtttttgttacgatactggacactgtttaattgatgaggatgcttatgtaaagaacttaaaggataaaataagactgatacacttaagtgataatgatggtatcaatgatacacatgttggtataggaagaggaattttatctgaagaggggattaaagaggtcttaacattagatgcagaatatttagtattagaaataaattacgaagacattgaagatactataagtaaattgaataatattgtaagagagggttaaatacctctctttatcttgttgatatgcctcattaactaaaatttatattcatcaaaaggaaggagatgttgaagtgaaaaaaataaacttaaaaatagaaggaaaagataaggaatattcattagaagaaaattcccctggaatcagattgggagatatagcgaaagaattttgtgatgagcataagggttatataacacttgcagttgtagacaataaactaaaagagctaaattgtagagttaagaaggattgtgagataaattttttagacactactaatgaagatggagagagagtttactttagagtcatgtcatttatatttgtaatggcttgtagagaaatcttttgggatagcagagttacaatagaacattcactatcagatgggctatattgtgaagttcatatagatagaaagcttaaagaagcagatgttgaaaatataaaaaacaagatgaaagagatagtaaacaacgattatgttatagaaaaaattgaagttacaagaaatgaagctatttctatatttgaaaataatgaaatgtatgaaaaggcagagcttttgaaatacaaagagtatgatagtgctaaagtatataagtgtagaaactatatagaccatttttatggttatatgttgccatcaactggttatataaaatcatttgatattaagctttataatggaggcgttataattttagggcctagtgaagaagataagactcttcctatgaagtttgtacctcaacctaagctatcaagtgtatattatgaagcagaagaatggtcaagacttatgggaattgacaaggtagtatctcttaacaaaataatagaaaacaatgaatatggagatataataaggacattcgaagcattgcatgaaaagaagttatcccaaatagcggatatgataaaggatggcaataagagagtaattttaatagcagctccatcttcatctggaaaaacaagttttgctcacagattatcaatacatcttagagtaaataatttaaatcctatttcaatttctttagatgattattttatagatagaaaacatactcctttagatgaatatggaaattatgattttgaatcaatttatgcaatagatttagagaagtttaacttagacttaaagaaacttttagctggtgaagaaattgatgatataagattcaattttaaagaaggtaagagagaatacactggtaaaaaaataaagatagattcaaatcagccaattatattagaaggtatacatgggctaaatcctattttaacatcatctataccagatgaagataaatttaagatatacataagtgcccttactcaaataaatttggatgaccataatcgaatccctactgctgatttgagaatgataagaagaattgttagagactataattttagaggatatagtgctgataatactattttacaatgggcatcagttagaagaggagaaaagaagaatatattcccgtaccaagaggaggcagatgctatatttaactctgcttgtgtatatgaattagcagttttaaaacgatttgcgaaacctttgttggaagagataaaggaagataatcctgcacatattgaagctactagattactaaagtttttgcagtattttgttgaattggacgatacttctgacataccaggtatttcaattcttagggaatttattggaggaagtaaaatagttgattaatatgtgtattatagattgttttatgaagattaaatggcatagcaagtagtgtgattggtttatgttaagtatattaagtgtaaagtggagaattaaattgatacagattttaaagtttgagttgatatataaaaaggcttgttttatacttttgtatgaagcaagctttttattttaaattttacttttttgtttaatattttgttagtttatgtgataattttttaaaagagtaaaagagtaaaagagtaaaagagtaaaagagtaaaagagtaaaagagtaaaagagtaaaagagtaaaagagtaaaagagtaaaagagtaaaagagtaaaagatgttaggttagaaatttttgacgttataagaatttaaattactggattattagattactaaattactagattattaaattattaagctatttaaactgtttaaattgtttgaaaaatgaattgattcttgtagaaaatagttttaaagtataattttttttaacactgttttattatagtacaaacttgtgctaaaatagaatatataacataatataagaggtgcatatgaatacgttagatgagacattattaaaagaaattataagttctaataagaagtatactaattatgggcaagtcgctagttacataccagaattaaaaaacgctagaagaaatgatttaggaatttgtatcatagatagcgaaaataatctttatagtgctggaaactgtagcacaaagtttactatacaaagtatttcaaaaccaattgtgcttgctatggcacttatggataatgattgggaagacgttttttcaaacgttggaatggagccaagtggggacccatttaattcaataatgaaacttgaaattaatgacacaaaaaaaccctgtaatccaatgataaatgcaggggctatagtaactacttcccttataaatgggagttgtttagaagaaaaagaagaaagaatgcttagtttctttagaaagttagcaaaaaatgataatataggaataaactatgatgtctataagtctgaaaaaatgactggagatagaaacagagctatggcttacttattgaaaagtgatggatttatcagagggaatgtagaagatgttctagacctttattttaaacaatgctcaattgagatagattctgtagatttagcgagaattggaataaatcttgcaaattatggagtagatatagaaaatggtgagcatttaatgagtgaaatggtttctaggattgtcaagacatttatgatgacttgtggaatgtatgatgcttctggggaatttgctattaaagttggcattcctgcaaaatctggagttgggggtggtataatggcttctgtgccgggacgcatggggattggtgtttatggacctgcgcttgacaaaaaaggtaacagcgtcgcaggagttaaagttttagaggagttgtcaaataaactcaaattaaatattttttaaaatattaagaaaggatttttttgacaacaacatataatttaatatataattaaattgtaaagaaatatgaattaaataaattttttaggaggggtcaatgaaagaggtattggtattacgagatttggagtgcataaaggctattgcgcatccacgtagaatagatattctaaaagcatttgacaaatcgccattgtcagcaaaacaattatctcaattattggaagaacctcatgcaaaaataaactaccatataaaaatgttatacaaagttggtattttagaattagttgaggaaaaaataaagtcggggattgtggaaaagtactattatccaagtgcaaaaaatgtggttatagggaataggatacttaatttttctttagacaatggggaagaaaaagaagaattgtacatatcaaaatttgaaaatatgagtgaagttttttataaggcagcagaggaagatgttttagaaaatgaaaatatagttgattatcatgatatttctcttactcatgatgaattagttgaacttagtgacactatgaagtcaaagatagatgaaattttaaataaaagacaacacaatgttgaaggttctaagtatgatatagctatggttatagttcctactcttgaggaggaatgtcctagttagagaattaattatggattaattaaagatataatattagagattgaacatcaaaatttacttaataatcaaaaaatagtttttggtatgggtaaaacaatgatttttaatctctatttttttgttttcttatacctattgtatttgtaaataatatgtatagtgtaagatgtatacactatctgagaagtgcttagataatatacaaagtatgtaagattataatatttgaaattgattaaaatgggtataattaaagtgtaaatattaaaattaaaaattaatataaattaaatcaatgctagaaatatgttaaaagaggaatgagattagttgggatagaacatcccttagagcttatgaatttttagtgaaaaagtactatcaaataggaatctccatcttcatatgttggctaaatatagttaaggtggagtagttcaaaattaaaattgagtacaagtcgtagtacaaataaaaggagattaatatgattaaattaggaacacatctttcaatagcaaaaggatttgctaatgcggctgagacagctgtatatattggtgcaaatacatttcaattttttagtagaaatccaagaggaggaaatgctaaagaatttgatgaaaaagatataattaaatttcaagaaattagaaaagaaaataattttgcaccactgcttgcacatgcaccatatactatgaatctgggtggtacaaaggatgatgtatacgaatttgcaacaagggtgatagatgaggatataagaaggatggactcattaggaattgaatacatgtgttttcatcctggaagtcatataggtggtggtgtagattttggtatagatagaatagtaaaaggattgaacaatgccataaagggtgatgaaaatataactatacttcttgaaactatgtcgggaaagggaactgaaataggttttaaatttgagcaattaaaaagtataatagacaaaattgagcataaagaaaaaataggtgtgtgtcttgatacatgtcatattttttcagccggttatgatatagtgaatgatttagatggggttttggaagaatttgataaggttataggcatagaaagattgaaaactgtccatctaaatgatagtatgatgccatttggagacaaaaaagacagacatgctcctataggggaaggaaagataggattaaaagcattaattgattttatggaacatcctagtctaaaacatttaccatttttcttagaaactccttttgatgatgaaggtcacaagagagagcttaaaatgataaaagaaatactatctagtaaataaacctttattaaaaatatgtgaaatactccgccctcaacataattaaggtggagatacaatcatgaaatgtgataatttaaattaatggataggaataacaaaaattgtatacaaattaactgggtataaagtatgattatattatgaatagtatgtaaatatattgcaaagattctcataatttgttgtataattaaaggtaacatatttatattatataaaaaattattaaaagttaggtggggaaagatatgagaaatttaggcaatactaacatgaaaataaagagagttggctttgggggcattccaatacaaagaattactcaagatgatactaacttagttataaatgagttagaaaaacaaggaataaactttattgacagtgcaagagggtatacaataagtgaggaagcaatcggaattgccattgaaggaaaaagaaataaatttttcttagctactaaaagtatgtccagagattatgattcaatgaagagagatgttgaaataagtttaaataattttaaaactgattttatagatttatatcaattccataatgttaaagaagaggagtatgataatctttttaaagataaaatggcttatagtgcccttttagaggcaaaggagcaaggtaagataaaacatattggtataactagtcacaatttaaatactatagaaaaagctatagaagatggaaaatttgacactatacaattcccttacaatatagttgaaggacaagcagatgaagtgtttaaaaaagctcatgaaaaaggaattgggataatagtaatgaaacctttagctggaggtgctttagacaatgcaacactggctattaaatatatactatctaaagattacatagatgtagttataccaggtatggagagtgttgaacaggttagacaaaatgtcgctgtacttgaaaatcttgttctagatgaaaaagataataaggaaattgaagaaataagaaattctttaggtaaaaaattctgtagaagatgtgaatattgtatgccttgtgctgtaggaataaatataccattgagttttttatgtgaaggttattatactagatatggattaaaagagtgggctaaagaaaaatatgaggttatggatgttaaacctactgagtgtattgactgtgggctttgcgagagtagatgtccatatgaacttcctataagagaaatgcttaagactgttgttgaaaagctaggatagattttatttattgaaatcggtgtattaaatttactccgatttctttttattagatgtggtcttatatacaaatattaaatttacatagttatagctattatataaatttaatatttgtttaatacttattaaatatttgcttaatgctttttaaaaacatttgtttgagtatagacataacacaattattattgttgtattagtatagtttcaaatactggagtatcaatataatgtcgaataacacataaaatctttatttttcaaaaatattataggatatatcgtatttagatactggataaagttcaatttcaaccctagggttatctttatctataaaatcaaataaaaatactggcttaagttgtttatcattttttattattccacttttttcaataccatcacaaatactttttggataattatgtaaatcccccattctcttatttggaaagaataatttcaagactgttattagattttcttcaacagtttccccttgatactgttggtttataaaacctgcaatcatgttttcgtatgcaagatacttagaatattttccctttgaaggcatccatgcttgaccatttatgttatgaagcttaaaattagatttactaataggtctacctggaattgttattttaatcaaatttttcaccatccttatacagtatttattataatctgtatatgatttaaaagcaaattgttatttaaagtgtttttacagggcttgtttgtaaaattttccactttagatgtagtaatataagataagtattttgcttacaaattttaaaatttgatatatgatggacatattcatattagactattataagaccttcataatattaataagtataggtttagtaaagagagtaaaaagaaatccatataagccaagtaaagacttaataaatggcaatgtaaatgggatattaattataagaaaaaatcaatctttttgcattaactataggaagaatgtcaaaatataactaatgatatttgaagttttagagtttatattaaaaggtaagaaggttaagtgggtaaaaaaggttgaatagattaaaaaggctaagtatctaaaagagttaagtaggtaaaaaagttaaataagtaaatgaaaaaagctaagtatctaaatgagttagtagataaaaaaattaaatagataaaaagattaagtatctaaaagcgttagtagataaaaaaattaaatagataaaaagattaagtatctaaaagcgttagtagataaaaaaattaaataaataaaaaagactaagtattcaaaagagttagtaggtaaaataattaaatagataaaaagactaagtatttaaaggagttaagcagataaaaaagttaaataagtaaatgaaaaagacgaagtatctaaaagagttagtaaataaaaaagttaaataagtaaataaaaaagatgaagtatctaaaagagttagtaggtaaaaaactaaataggtaaaaagacgaagtatctaaaagagttagtaggtaaaaaagttaaataaataaaaaagacgaagtatttaaaagagttagtagctagaaaaggttaaaaagactaaaaaaattaaataaatttaaaaagtcaattagattaaaaaggaataattttatggataataaggaattaaaagcattttgtaatttaataggattaaactgtgtaggagtagcaggggtagataagtatgataatttagaaaagatacttaaggacagacaacaaaaaggttatttaactggtatggaagaaccaataattgagaacagaattaacccaagacatataatgaaggatgctaactctataatagtctgtgcatttccatatcatataaatagacaagaaaagaataaaaattcaaatttatcaaaatattgtcatggaaaggattatcacattgtagtaaaggactttttacaacaaatttgtgattatatttctaaaacagtaacagattttaaatacaagttatttgttgataatggaccattagttgacaggtatttagcttatttatcaggaataggatattttggaataaataataatatcataactgatgaatatggttcttacgtatttatagggtatatagtaaataattataaatttgaagaagataaaccactagaaaaaagttgttttaaatgtggtaagtgtgtaaaatattgtccgggaaatgctatattgggaaattatgatatgaaccccaaaaaatgtttatcatatataactcaaaaaaaaggagatttgtcagagaaagaaaaagttgttttaaagaatggcaaaaaggtatttggatgcgatatttgtcaagaagtatgtccacataatgttgaaatgccaacaactcatattttggaatttaaagaaaatataatagattatttggattatgatgagatacaaaatatttcaaataaagaatttaaaaggagatatggagatagagcttttagctggagagggagaaatataataaagagaaatatggaaataattttagataagtatgatgactaataataagagtctgtttcatatactttaatgtgtatttactttaacacttgttgtgtaaaagtcatattatatcattaaagttaaatatggggaggtgggggaatattgaaatataataatacatctgaaataaatccactagattatatattgggtcaagaaagagctgtagaagctatggaattagggttgaaaataaataatccagcgtacaacatatatatagctggtgaacctggaactggtaaaagtacttatgccttaaaggttttaaatgaatatgcatccaaaaaaaatacacataaagattggtgttatatatataattttgaaaaccctagagagcctattatagttgaattagaaaaggggtttggaagagaacttaagaaagatatggagaaattaattgaaagtcttttagaagattttaaaaatgcgtttgaaagtgaaaattttgaaatagaaaaaaatagacttctagatgaatatgaaatagaaaaagatatgcttttgaagcaaattaagaaatatggggaagaaaaaggatttaaattaaaacagagtaaaatgggaatagtttttatccctttgaaagaagaggaagatgaaagtgataagtctgatgaagagttttacaaagctaaaagagaactagaaaatatggcgatacaggtcgtatataaaattagaaacttagaagaaatagctgaaaaagcagtgttagagcttgaagaagagatagctaaacttgtagtagaacctcatatcaagagattgtgtgaaaaatatgaaaattatgataagattcaaacttatctggaaaatataaagaaagatataatagaatatatgtatttgttctatttagatgaagaggagttaaaagataagtatgataaagagcattttattaaatacaaaattaacctatttgtagacaatgaaagctcaaagaataaagaatcagcacctgttgtagtagagataaacccaagtccagcaaatctatttggaaaggcagagtatgattatgcaaatggaaatataaagactgatttcacaaaactattatcaggagcatttcatagggctaatggtggttatttagtactttatgcagaccaattactaaaatatacaatgtcttgggaaattcttaaaaagactttgcagactaaaaaagtaatattggaaacacaaacagcaattaaaccagaaaatatgccattggatgttaaattagtactgattggaagccactatatatatgatattttatatagatatgatgaagattttgaaaaatattttaaagtatttgtagactttgatagtgaaatggataaaaatgaagataatgaagaaggaatagcaagatttatagcataccaatgtgataagaataatttaaggcattttactaaatcagcagttgaagaggttattaaatttagcactagattatctggtgatttagaaaaactatcaactaagtttaataaaataatggaagttgtaatagaaggaagtgcttatgcagagtttagaaattcggagtatacagagcagtgtgatgttaaaaaagcaataagtgaaaagagaaaaagaatcaatagagtggaaacacatatggatgaatcaattgaaaatggatttactctaatagaaacagagggaagaaaagtaggagtgataaatggtctgtcagtcttaagtacaggagaatactcttttggtagagcttcaaggattacagcgaccactagcccaggaagtaaaggcatagtaaatatagaaagagaagtaaatatgagtggctctatacataacaaaggagtgcttatattaggtggctatctttctgagaattttgcacaggatttactattgtcactaaacgcatatgtttgttttgaacaaaattatggtggaatagatggagatagtgcatcttctgcagaattatatgtactattatcatctcttagtggagtatcaattaaacaaaatattgctgttacaggttctataaatcaaaagggtgatatacaagtagttggtggtataagtgaaaagatagaaggattttattctatatgtaaaactaaagggttaaatggtgagcaaggcgtcataattcctagaaaaaatcaaagaaatctcgttttatcagatgaagttaatgatgcagtgcgagatggaaaatttaagatatatactgttgaaagagtagaagaggctatagagatattgacagatgttaaatttgaagaaataaagaaattggtaaaagaaaaattaatatctttcagcaagatacaaactgtgtcaaaagaataagtttattatagaatttaatgggtatttatgtataataaaaagcaagaactttaataggtttttgctttttttgtaaatatatataaattaaattcttattttgtatgttttatatattgatgtttattttttgttgatatgactaaactatttataaatagtgttttataaattggtattttaaagggggataattatgaaaaatgtaaatctaaaagagataaatgaaaaagatgtaattgtggaagaagatataaatctaaaaggaatggataagaaagatgtaattgagaaggaagaagtaaataaaaaaagtatagataagaaagatataattgagaaagaagagatagataaaaaaaatgtaaagaaggttgaggttcaaaaagaaatagataaaatgattagtaaaaaagatgagataattgatgagaaagatatagagaattttaggtatattgaagaagataaaaaaagtatcaaagtaagtaaaaaaagtactaaaaaaggtgaaacggagaaaaaaacaaagaaaagtagttctaataaggctacacaaaaacaaagcaaagaagttaaaagtaagtctaaaattaaaagtgaatcagccaataaaaaagatgtaaataagattttagatgagttggaaaaattgtacccagatgctaaatgtgagttaaattatgggacagcctttgaacttttaatagcaactattttatcagcacaatgtactgatgtaagagtgaataaagttacttcagagttgtttaaaaagtacaacacagctagagactttgctaatttgagcattgaagaaattagtaaagagataaagagttgtggtctttacaaaagcaagtctcaaaaaataaaggatacatctgaacagctatgtgaattatatgatggtgaagtacctgatagcttagaaaagcttataaaattacctggtgttggaagaaaaacggcaggggttgtacttagtaacgcttttaatcatccagcaatagctgtagatactcatgtatttagagttagcaatagaataggaatagtggacgagccaaatcctcaaaaaacagaatttgcacttatggaagctataccaaaagaaagatggtcacactcacatcatgtattaatttttcatggaagaagaatgtgtaaagctagaaatccagaatgtgcaagttgcccaataaaagaagattgtaattattataaagaacttaatgaaacgaaataacttttagaaagtaagttgtacaagagggattttctgatataataatacttgtgaaaatgttagataaaaaactattatatacatgaaataaaaattattattaacattattttatataatagtataatattattgttattctgtttataaaataaaatttgataaataaaagcgatacttagggaggattaaaatgtcattaaatatagtattagtagaaccagaaatacctcaaaatacaggaaatataataagaacctgtgcagcaacaggttcaactttacatttagtaaaaccactgggtttttcattggatgataaacacctaaaaagatgtgggcttgactattgggatatagctgatatacaatattacgatagctttgaagaattacaagaaaagtatccaaatagtaaatactttttttctacaacaaaggctaaacagtcacattcagatgtgaaatatgaagaaaattgttttatagtatttgggaaagaaacaaagggattaccagaacctttgttgaaagcaaatatggatacttgtattagagtgcctatgttggatgttgaaaaggctaggtcattaaatttatcaaattcagttgctattgtagtgtacgaggctttaagacaaataggatacccaaatatgaggtagtttcaacaagcctaaatgagaaaggagcatacttaatgaaaaatctaaagataatctgtgacagtttatcggacgtgccaaaagatttgttagataaatatgatatagatatagtttcattaacagttatactggaggaaagagaatacaaggatagaattgatatatctggagatgaattttataaaaggcttagagaagaaaatgtatatccaaaaacttctcaagctacttatgcccaatttaaggaaatttttgagaaatatacaaatgaggatagagagatactttatatagcagggtctgccacagctacagggacgtatcaaagtgctgtaatggcaaagaatgatgtggatggtaaaatatatacatatgactctaacttgctttgtatgggaactggtttacttgtaataaaagcaggagaacttgcaagtgaaggaaagtctgttgatgaaatattacctgttttggatgaattaaaagagaaggcttttgttatattttcagtagatacattggaatatttacaaaagggaggtagaatatcatctactaaggcagcaataggaagtatattaaatataaaaccgattcttgaaataagagatggactagtttcgcaaatatctcaagtaagaggaaagaagaatgtaatttctaagatgatggaattgataaaatcaaattgtggggatgatttatcagaccaaattgtgtatataggatatagtgatgattttaaggaaaaagaacaattatctaaggttatgcaagatgaattaagacctaaagaaattagatttttccaaattggtgtgtgtataggtgcgcatgctggtcctggtgtcactggtatcatatgcttaaaaaataaataatatatttttggatgacattatttatttttttattaaattaggatagaatattaattattgagatgttaaattggatttattttggatgaaattaagtgttgatatattagatttagtttgtagggaagtgtgtaaatagataagaatctattgcacacttttttatagtaagatttattaaaaaaatttcaaaatgtacttgtaaattgtatataaaaaaattataaataggatgtaaaagtaaataggatgtaaaagtaaataggatgtaaaagtaaataggatgtaaaagtaaataggatgtaaaagtaaataggatgtaaaagtaaataggatgtaaaagtaaataggatgtaaaagtaaataggatgtaaaagtaaataggatgtaaaaatatcgtaaatgtatgaggagtgaaatttaatgcgtttcaaaagaatattgatattgatgttaactgtagcaatgatagctggaatgttggttgggtgtgctaataacccaagcaataatcctagctctagcaaagataataaaagtgatataagcgataaaagtaattcaaaaaaatctgtatcaatgatactagatattgaaggaacaaataatgaagctatgaataatgcagctttattagcattaaacaatgctcaaaagaaacttaatatagatacaaacaaagtggaatcagatgattcctcaactttttctaatagtatagatattttatgtaatgacaattacgatttaattatagctgtaggagctagatttgcaaaaccattggagatggtagccaagaaatatccaaagcaacaatttgcaattatagactatgagtatgacaagcaaccttctaatataacttcaatttcttatgaagataataaatctggatacctagctggattaattgctggaaaaatgactgaaagcgataaggttggttttataggaggaataaagagttctagtagggataaatttgaatcaggttttagagagggtgttaaattttctaatagtagtataaaggatatttcagttgagtatgcagatgtttttaaagatagcaaatcagtagaatctatagctaaaaaaatgatggataatggagtggatattattttttctactactgaagatgattcaaaagctgtaatagatgcagtaagggcaaaaaataaaaaagttatagcaacgaataaagaccaacatgagttagctccagaaaatgttataagttctattgtaaaagattttgagaatcctacttataatctgatacaaagttttgtaaaaggaaattataaaggcggaaaagttatagaaaacacagttaagtctggaagtactgggcttgcccaaaatagttctcaaaatattcctccagatgtgttagaatatgttaataagaacaataaataatctactataatatccaagaatacttatgactttagttatgaggtgaattggatgttataatagacatatatagaaagacgtatgcagaggtaggcagacctatctaaatcagggagtgaattttgtgaaaataaaaaggatattgatggcttgctttgtagtagtttttacaatttttatattagctatatgtaactttgattttggatttgataaagtaaataagaataattctaatatagatagtgctaaatcgaaacagagtgagtctaaaagtgtaccaacttcagcagaaaaggataaattaaatagtaaaagtaagaatgaagaagatgacacagaagatgattcatatgtaagaaaaactattggagtattgttagataccgaaaacttaaataacgaatcatataataataatgtactatcagccttaaaaagggctgatgaagattttgatgttaggataaaacttgaaaaaccaaagacttctaaaagttttaaagagagtatagaaaaactacataagtatgaaccagatttgataatagcagttggagctagatttgcagagccaattaaagaagctgctactaaatatcccaaacagcaatttgcaatagttgactatacttataaagttcagccagctaatgtaatttctgtatcatttcaagataatgttactggatatttagcagggcttattgcaggtaaaatgactgatactgggaaagtcggttttataggcggagttgagggttctagtagagataagtatgaatctggatttagaaaggggcttaaaacttcaaataaagatgctgagttactagttaagtattcaaatatatttgaaaaccctgaatcagctagaactattgcaaaggaaatgagagattctgatagagatgttgtattttcagctacagaagatgatagtaaaagagctattcaggtagcaagagaaaatggtggtaaagttatagctattaataaagaccaatacgatatggctccagataatgtaataagttcaattataaaagatgtagaacaacctgtctatgaactgataaagaacgttgcaaaagatggttttaagggaagtaaagtaatggaatttaaaataaaagatggagaacttggcttgacttcaaagagcagtagaaatataccaccagatgttttggaatacataaaaaaagagtataacaaagtgaaagatacatattaattattgatgtagaagattataaaaatatactgtttaagtttagattagcaataaaaagatatatttattaaatttgtgctaactgtacaaaatatattgattaagtttagattggtgataaaaagatatatttattaaatttagtctaactgtacaaaatatattgattgagtttagattagcaataaaaagatatatttattaaatttgtgctaactgtacggaatatactgcttaagtttagattagtgataaaaagatatatttattaaatttgaaccaactgtacaaagctatactaattaagcttagattaactatataaaattataacaataagtgtgtgggcagaaaaattctgctacacactttatttatattcatataaaaaaattatcaaaaaaaagaaaaaggagtaaaaaatggaatttacaagagaaccatttatactagatgacgatttgtgtctagctttggtggacaaaagaattagttatctaatggaaaatgaattaaaattaagaaatatagagataataaaaacaatagaatgtaaagaattatatgaaagcataaaatatcacccggatatatgtatttgtaatttaggaaaaggagatataattgttgcgccgaatgtatataatcaatacaaagagttattaagtagatataaatttaatataattaagggagaagctaatttattaaatagatacccttatgatataccttacaatattgcgatagttggtgactatgctatacacaattttaagtatactgacaaagcaatattagattatattgaaaataataaacttaaaaagataaatatagagcagggctattctaaatgctcaatctgtatagtagatagaacgtctataataacatcagataaaggtatttggaaaagtatgaagaatacagaaatagagtgtttattgatagaaaaaggtcacataaatttatttgagatgaattatggatttataggtggatgtacagggttgatttctaaggataaactagctttttgtggagatgttaaaaaacatcctgactatgaacgtataaaaagttttgtagaaagtaaaaacaaggagatagttacacttagctgtgaaaatttactagatataggttctatagttcctctcatgacaagaaaggagcgataactttggttgagaaggataatatttcttccatgaaatttttgaggaataataatgtaaacgatagattaatatatacgaatgacattgtagaagtagtgatagattctgcaaagcaagaagtgttaaataaaaaaatacttaatggtactaaagctgaacaaagagctttaaatattgatgagatatcaacggaaataactagtatgataataagtataatgaaagagaaacttttgaaagaatacattctaaaatgctatgggcgtacatatcctgaagataaaaataatatatacatatattcactgaacatatttgctaaaaaagagatttttatgagagaaacagtatttactagggtgagaaattatatagaagaaaatgattttataaatgtagaaggttttattagatttagaatgagagaatttatgaaatatatttctgctataggtgatattgcagttgaggagtatttaataaagaaagaccaagatgaatttataagagttttaaaatactttatagatactcaagaagaaaagattgatttgcttaaagttcatataatggaagataatacatttgttttatacgataaaaatggaaataagatagacagtatagatgatgaagaaattataaatatggtaataagagaaaatttaaattatgaggactttttaataagtaccttattaactctatgtcccaaaaaaatagaaatattggatttgttaaataataattgctcaaaggaaattatagatactgtagaagcaatttttgaaaataaagttagtataattatggaaaactagaatctaagcatataaaagctagccatataaaattaaaaaaattctttttaaatcgacacaaaagacttataattgtatataaagctatagtataactagagttattaagtataaagaatatctacttgattaatgcaatatagctggcaaatatacaattgataaggagtaattttataatggataatttaattaggatactgatattagctgttattggtggatttataggttatgttacgaatgtagttgctataagactgatatttagaccaatagagcctattaaaatacctattttaaatatagaaatagtaggtcttataccaaagagaagagcagaaatagcagcaaatgtaggagaaataattcaagaagaatttctttctatggacgaaatacttgcaaatatcattactgacgaagataaggaagaagttgtaagatacataaaagcaagggtaaaaattataatacatgagaaagtttcatttatcccgagtggtataaaaaacatgatacaagattatctaggagagataattgagtctgaagttaagcaaagtatagatgaattgagtaaaaatataataaataaagcaaatgaacgtatagatatacaaaaaatggtcgaagataagattaatgaactagatttatatgaattggaagagataataataagaatagctaagaaagaattaaaacatatagagtttttggggcttgtcttagggtttttaataggtatagctcaagggttaattactatgtttatttaaatatatgagaagtagcatttatttaagtactaattatatttacctatttgagtgaattacttattaatagtatttagatattaattgtatttacctatttgagtgaattacttattaatagtatttagatattaattgtatttacctatttgagtgaattacttattaatagcatttagatattaattgtatttatttatttgattgtgttacttattaatagtatttaagtatttactgtactacttattaactatattaagtattgattgtatttaagtatacaaaacctaaaaagagtacaaaaattagaagttagttttaataaaaattagttttagtatttatctagtcatatctatcatgcatgtggatacgttttaaaaattttaaatttatgaaaatattataatatcactataaatcaagagattaatttaatataaaaatataagaatattggtttacagctgattgagatgaaaaataatgggtaattaatatattacattaatgttgattgatgtataactatctgttataatgaaaatatattaaaaatcatagtgttgaagaggaagagtagagtagaaaccattctcagagaatttgggtctatggctgagagcccatgtaataggtctatttgaaaactaccttggagctgagcttattagcagtatttgtatttgtactatacgtgaaagtgctcgggtgacgaccttatagtcatcaagagggttgtatatacttgtatacgccaacttgggtggaaccgcgaattaatatcgtcccaaacatatttggggcgattttttattacaaaaaatctaaaaattatttcaataaggaggaaaaaacaatgattaaagttgctttaaaagatggctcaataaaagaatttgaaaatgctatttctgttatggatgtagctaaatccattagtgaaggattagctagaaatgtggtagcagcgtctgtgaacggagaggttgtaggtctggaccacattatagatactgattgtgacttgaatttatttaagtttgaagataaagaaggtaaggaagtttttagacatacatcagcacatatattagctcaagctataaaaagactttacccagaagcaaagcttgctataggaccaagtatagaaaatggattctactatgatatagatttagaccatagattagttccagaggacctagagaaaatagaagctgaaatgaaaaaaatagctaaagaagatttaaaaatagaaagatttgaacttcctagaaatgaagctttagagcttatgaaagaacaaggagaagactataaggtagaacttatatctgatttacctgaaagtgaaataatatctttctacaagcaaggtgattttactgatttatgtagaggaccacatttaccatctactaaaaaggtaaaagctgttaaattacaaagtgtagcaggtgcatattggcgtggtgacgaaaataataagatgcttcaaagaatatatggaacttcttttgagaaaaacaaagacttagaagagtacttacatttactagaagaagctaaaaagagagaccacagaaaattaggtaaagaattaggattatttatgatacctgaagaaggtccaggattccctatgtttttaccaaaaggtatggaacttaaaaatgaattattaaaattctggagagaaatacacagaaaagctggatatattgagatagaatctccaatcatattaaatagaaaattatgggagacttcaggacactggtatcattacaaagaaaatatgtatacagttaaaatagatgatgaggattatgctataaaacctatgaactgtcctggtggattaatttactataactctcaactacattcatatagagatttcccaatgagagttgcagagcttggtagagttcatagacatgagttatctggtgcattacaaggattaatgagagttagagcatttactcaagacgattcacatatattcatgttaccagagcaaattaaggacgaaataaaaggagtagctaacttaatagatggtatctacaaaacttttggatttgaatataatttagaattatctacaagaccagagaactctatgggaagcgacgaagagtgggaagcagcagaaaatggattaagagaagctttagaagagttaggtctaccatatactattaatgagggtgatggagcattctatggtcctaagatagacttccatctaaaagattgtttaggaagaacttggcaatgtggtactatccaattagatatgcaacttccaagacaatttgataatacttatattggtcaagatggtgaaaagcatagaccagttatgattcatagggttgcttttggtagtatagaaagatttataggtatattaatagagcattatgctggtaaattcccagtttggttatctccaactcaagttaagatacttcctatatctgataaatttatggattatgcaaatgaagttaagaaagagttatttgataagggtataagagttgaattagatgatagagctgaaaaaattggatttaagataagagaagctcagcttgaaaaagtgccatacatgttaatagtaggtgaaaaagaagtagctgataataatgtttctgttagatcaagagataaaggtgaaataggtagtattaaattagatgaatttatagctagtatttcaaaagaaattgaatcaagagaaagtattattcaagactaatatataatatattagtagctaagatattgttatataagataagtttaatcaatatgttgatatgttgatacatagtgattaaatttatgaaaagatgagtataattagaggtacagttaatcatatttttatgattaatgtacctctagttttttgtatggtagatttattaataaatatatcatagaagtgttttgaacatggaaatatttatgtgcattctttaaataaaagtttattttttgaatgataattaagtgcttgttggtaaggttatggctgtaaaaatcataactttatttttatatttgttccattttcataaaaattattatccctttaagaaaatttcttaatcctcttgaaatatttcctttttagtctaaagttaaatttctttcttcaaaatgaatatttaaatgaactaaaatttaagtacattttctaatcttatgagtctatttttcatagataattgccctataatagaagaatctatgttggggctatgtggtgacaataacagcattgtcagtgattaattaatgctttataaatgattaattagtgttttatgttatttttggacttaccctctatacatagattaatttatttaactttagatatagagagaatgtcaagtacatacacagacattagagtttaagaaagtgtttatggagcaagaacttttaaaagaagtagtgacttagtttaatttcaagaaatgataaatacaaaagaggaaaaagagaggtgttgaaatgatagaaaaagtagaagaaaaatctaagattattaaaacatcaaaagaatataagcgaactataattgaagaaaaagataaagaatggaccaaaaaattaaatgatatacttagtagaagtagtttttgtaatgatgaattagataaaatcaaggcgttaattccaaaagagattttgactaatgaaaatgttggagaagttgtgactgaagatggatatgctaagcccgagtatgatgaggtatttaaatcattgttcactttaaataatgaatatgatttacttgtaaattttataaatgatattctaaaagatgctccatatgctaacaggaatatcaaaccgttcactcaaataaagagaataattagagttgaaactgatccaacaattaattacattggagagaaaagacctagacttgattaaaaaatagctacgcacacttgtgactttagtcatgagttagtagctaaaatagtcagcatatagggaaacttatatgtagagataggatagaacctatccaatactacttgaattgctaaaaacccctaaagctaaccaaactaaaacataaggatgaaataaacctaagtgtgaaagttacgaaagtagaaaaaattggttagatggtataaggttaaaccctaagtactttaaaatgggcaatcagcaggtaagctccgaataggagaagcttcaacgactattcctcttgagggaagtacactacaagttattggtagtggaagtgggtagaccttagcggataatgccgaaggataagatatagtctgtgcttgaatgaaagtgtaagaagttcataagagaactgcataggtagtagcgaacttatgtgaacgacaacctcaaaaatgataaaagttaagacttacggttcttatatatgttatttaaaaataaatataaaaaaccttcaaaatacttgttttaagtaattgcatattttaatattatgataggtgatgaaaaatggaagttactcatggtagaggatatgcatatagtatgtcaaatacagacatccgtattatggggagacatctttggaatcctagttatttcgttgctactgtatcagaaaatacagaggagcagataagaaaatatattaataatcagaaaaaacaagtaaagtgaggtggtagtagtggaaaaagcttataagtttagaatgtatccaaataaaaaacagcaagagttaattaacaaaacttttggatgttgtagatttgtatataataagtatcttgctaaaagaatagaagtttataaaaatgctaaagaaacttttacttataaacagtgtagttctgatttaaccaatttaaaaaaagaattaaaatggcttaaggaacctgacaaattttcactacaaaacgccttaagagatttagataatgcatataaaaaattctttaaagaaaaagcaggatttcctaaatttaaatcaaagaaaattaatagattttcatataaaactaactttacaaatggaaacattatgtattgtggtcaacatataaaactacctaaacttggtatggttaagataagggataaacaagtacctaaagggagaatacttaatgctactatatctaaagaaccaagtggtagatattatgtatcattatgctgtactgatgtagatattgaagcatttgaaaatactaataatcatataggtttagatttaggaattaaagaattttgtatctcaagttgtggagactttatagaaaatcctaagtatcttaagaagtcattaaacaaacttgctaaattacaaagagaattatcgagaaaaacaatcggtagtttaaacagaaataaagcaagattaaaagttgcaagacttcaagaacatatagccaatcaaagaaatgattttctacaaaaactatctactaaattaataaaagagaacgatattatttgcatagaagatttacaagtaaagaatatgattagaaatcgtaaactatctcgtttaatttcagatgtatcatggtcagagtttattcgtcaattagaatacaaggctaattggtatggtagacaaattgtaaaggtaggtaaattctttgcaagttcacaaatatgcaataaatgtgggtataaaaacgaggaagtgaagaacttaaatataagagaatggatttgtcctagttgtaatgaaactcacgatagagatataaatgcaagtataaatatattaaaagaaggattaagattaataacaattcaaaataaataacttatgtaagaaccgtaggaactacggggatagcctgtggagaattagtaagacatatgttagtatgcaaaattctatgaagcaggaaccctgtgactttagtcatgggaggttcagattttggctgaagatgaagaaaataatcatataaatattgagatgcaaagagcttttgagaacgattatttggaaagagctgaatattatcttagtcgtgtacatggtagaaagttagaagaaggtaaagagtataaagaaattggaaaaactattggaatacatatactaaatcatgtaaaatataatcacatagaagattatgtaaattgcctgagattaacaatggacgagcatccagatatttattctagtaaaactgcattatattttatagagcttccaaaaattcataaatctgactatatagtaaatagaattatgctatggggaaaacttattgataatccttctagctcagatgtaagagttatagctaagaatgattctattattaaaaaagcacttgatagattaaaagaattaggtagcaatgaagaatatttattaaatctgaaaagaggtgcttatatcatgaataaaagtagaaattttaaagaagagattgaaagagagacagcaattagagttgcaaaagaaaaagattataaaataattataatgttgaaaaaaatggttttaaattagatgacatattgaataaatttaatgattttgacttaagtgaagatgagataaaagaagtatatgaaaataattgatgataaataaaaagtgaacttatataagtttgctgaatctgagcctggaaatatttatgtgtattttttaatgaataaaaatttattttaaaaacaataattagaggtacagttaattatatttttatgatactgtacttctagttttttctattgtagatttattatttactaataaatctacaatagaagtgcttttgttgtaagaatcattttatctaatgattgttttttataatagttaaatttccatttgtagtgcttaaatataaatttgtaataccatttttataagtgtataaatcactatgacgattcaactcaaagtcactgtccaaaacaccagaaaccttatcaaaatttaaagtgaaacctggattatcaggaatagacaaatcgacattggcagaagtagtttcacagtacagagaagacaacattttgctagaattgatttttatattactgctagttgactcagctttaatgtcagaaaaaactccagataagttcatttttccagaaactgaactacaagtaagatttttattgtatatatcttttaaatttatattgccattagttgtttctaagtttaaaacatcaattttcccagaaagctgtatttcaccagatgttgatttgagtgtagcatttttactatttagttttgttatatcaatgtgaccactagttgtgtctaaatttattttattaatattaccagagagacctattgcacctgaaattgtgttagcttcaactgtattacttcttatgtaagtgctatatatatctgctgaagtagtatataaggttattttatcataaagcttattgggcaaatatagttcaagtattgttggttttggaagattaattccaatgaagaattttttagttgaattatcatatatagaaagagaatttccgtcaaccattatttttgctagttttttctttgagaaattactagggattttttgaattaatttgattttattagaatcacttctcttaattctaacttcacctgaaatccaatcaacattaatgtcatttattttatctgaaaaactttcatttttagccactatatagttatcataattgtatttaggattaagagtattaaaagggaaattaaaagaatgtgaaattatagttcctataaggagtgagataaatacaatagaaagtgatattgccaggatactccagatgaaaatctttgcctttataagctttttattcatatttatcctcctccttgtagccttttagttgtataattcctttgacaatgttgacaccagcagcacctattataaatagtatccacgaaaaggaccaaatattaaatagtatgcttgtgattagatatatagaaactactataatccaatatgcattcataaatgatttataaactggatttatatgattataattttcctcaaaatcctcaaattctttgaatttatttgataaattatcattgtatagagcatagtttgtccttgtcatttgattatagactaataaacctactccaagtgctattaatatgagcattaaaagaatagctatagttggttctatgccaaaacttacaactgagactacaaataggaaagggcttattataaaaagagcaactgctattgatgctcttaaggctcttttctttttttcttcaattaattcagaaggtagagaatatggttccttaacactttcaattaactcagataaatcaccaattcctgagattactgagttatatgcttcttgttctgttttaccatcttgtatttggtcgttatacttttcttttagattttcaaataattcatctttaagttctttgactttttttgtctcattaactcctgtaaagctactgtcaatataagtacgtattttgtctaacatattttcacctcctaaattaatatatctatcaatgcttttgtattattccattcttcacggctttttatatatttctctttacctatgtttgttattgaataatactttcttctagctccagtaacttcatcaccccaataagaggttattgcaccagattgttcaagtctacgaaatgctgtatacaaagtagcttctttcaactcatacaatcctttggttttttcaagtatagatttattaatctcataaccataactgtctttttcaagtaaatgttttaagataattgtttctgtatgacctcttatcatgtcagatgcgattatcatgaaaatcacctccaattaaatatataatactttgatatacttcgcctgtcaaggtatatcatgagaaaagacattttattgtaatatttataaggttttatatagaaataatgtaaaaactttataaataatatattttatacctagttatagataactttatatagttattattaaaaaaagcaataaaaagtttaattcaatttagcaaatttagtgatataattaaaaaagaaaagaaatatggacttatttggaataattttgacaatctatttactacacgtgtagagtcgtatataattaaattatacataaaatataaaaaaataatttagtaatacgttaggagaaagtattatgataaagtcaagcttattttggaatattttcattgcgatatcctttatgatagaatggtttctttgtaagaaaatgctagattatacaagtgagaaaaggatttctaacaaaaaaataaacttttgtatggtaggtattattgtttttgctgacataatatatttttttgatgtacctccaaatataagagtaattatatctatgataattactattgcattttataaaatctcatatgatgtgggatttataaagtctgtattaatatccttaatttattggatgttactaatcgccacagatgctttgagtatatctttaacagtttggcttaattctataaatgacatgagtagtatggggacgggagatatatacagaattgagtctataatattgggaaagatacttttgattgtgtctttgtttttatatagagccttaaagataaaacttaatatagaaataaataaaaggacattattttatatagttattcctatagtcgctaatatagcatctttttttgtaatttttgaatacatatttaatccagggtctggtagcttaatacataatttccaattcgttatgatttctgttgtattgcttatatcaagtatcactttagttttaattgctaaaaaattacagcaatataatactttagttgtagaaaacaatatgattaaaaatactttgaagtatgaaaatgagtattatgaagatatagaaaagaaatatttaaaaactagattactaagtcatgatatgaaaaatcacatactgtgtataaatgctatgattaaaaaaggtattgatgttacttcttatttaaataatttgcaggtagaaattcagagtaatgacttgttatttaatactggtaattttatattagatgctatattaagtgaaaagaaagaagtttgtgataagaatgatatagaactaaaaataggaataaattttagttgttgtgaagctgttgaattagtagatatatgtcatatattttcaaatattttagacaatgcaattgaggcatgtaataaaattgatagtggaaatagagttatttgtgttaaaggtgatgttatgcaaaatttttatttaataagagttgaaaatactaagatgaataagattattactaaaaatggagatattttgacagacaaaaaaggttctcttcatggacttggaataaaaagtgtaaaaaactctgtaaataagtatggtggtaatgttgtaattgaatatgatgataaaaaatttgtagttaaaattgctattccacttagaaatgtgaagaaagcagttaatcatgtgatttaaatgtatataaatttgatgtgtagaaatttaatatataagaattaatgtataaaagtgatgtatagaagtttaatatataagaattaatgtataaaagtgatgtatagaagtttaatatataagaattaatgtataaaagtgatgtatagaagtttaatatataagaattaatgtataaaagtgatgcataaaagtttaatatataagaatttaatatgtataaaagtgatgcataaaagtttaatatataggaatttaatatgtataaaagtgacgcataaaagtttaatatataggaatttaatatgtataaaagtgatgcatagaaatttaatatataagaatttaatatgtataaatgtggtgcatagaagtttaatgtaaaaatttggtgtataagaatttaatatatatatttattttaatatataaattgaagatatataattaaatcatataatgccacttgtatattagaattgtttattgagtattagaaacttttaaggttagaaagtttatgactattatacattatattatttatagtatttattatagattatatagtgagtttaaaatattaaactttttattctacaaaatataaaaagaagttgcatcaaaaagagaaatgctctttaaagatgtaacttctatggtatatgtatgaggagctatattgccatctctggaatcaagcttctcatagcttctatagttgtttggataagcttatcaagttcccatccaagcatttctgcaccacttcttataacgtctcgagaacagccagcagcaaatgatttatctttaaatttcttcttaacagattttaattctaaatcagaaacgctctttgaaggacgcattattgcaacagcaccaattaaaccagtaagttcatccacagcaaataatactttctccataaattgctctggtttaacatctgaaccagttaatccatatccatgacttattgtagaatcgattattgatttatctaaatcaagctctgtcattaattctctttgtttaacacaatgttcatcaggatacatttcaaaatctaaatcatgtaaaagtccaactatttcccaaaagtctactctctcagggtcgtactcctttgcatagtatctcataactccagatacaatttgagcatgtcttatatgaaattcttccttattgtattttcttaatatttcccatgcttgttctaaagttggcatgtaactcatttttatcactcctctagctgaatattttgaatttttataaagtttattttccattgattatatcaatcaatttctaaaacgtcaacatactgatacgcaattttgcatttaaattcagaaattagtgaaaattaaatctttatatctaaattctttgtatctaaagattttcgttcctcaatgttatctttgatacaaatgctataagtagtgtaataaatccaactcctagtataatgatgtacactctatctgataataaatcaaaaagtttaccatacataacctgaccaagaggcattgcaattgctgttcctgcaaaaagaattgacattacttttcctaagagttcatttggagtttttaattgtgtgactgttataacatatattgagataagagtcgttgtaaaaaatattagcatagatgatactataaagattaaaaatggaactggaaatcctgtgtttaatataaatggatatactgaaaccgccattggtatgaacataactgcacatataataaaggaaatgtgcaaattagtgatttttagatgttttgagaaaataccaatactaacagcagctaccagtgaactaaaagaaattgctccttctgctagaccatataagaagttactagctcccatagtgatttttactatataggggataccaactattaacatagagcttaaaaataagtttattgctatagctaaaaaaagtatttttagtataaatctattttctttacatatatgaacaataccatcctttatatcagtaaatatagtttttataatgttgctgttttgctcttgtttgataaaaggaatctgtataaatatctccataattgcagatagaaagaaacttacacaacttataactataattgcattaattccaatcacaccatacaagacacctcctaatacaggtcctgcaatatttgtaagagatgcaactccagctacaataccatttgcattcattaaatgctcattatcaactaaaaggggtgtacttgactgaacagttggttgatacattgtgcttataactgataatatggtcataataattcctacaagtaatattgaaccattattgttgaataagaatactgctaagattagtactgtaagactgcttgaaaaatcaaaaataaccattaagtttcttctgttgaatatatccgcaatagctccaccaataggggagaatactataattgggattgaagatactgctagtatagtagcaaatatttctgctttaccagttatatcaagtatgtataaagataaagcaaatttaagtattgatgcaccaaacaatgagattatttgacctaatatcatcaagttgaagtttttattaaaagtgtttgaggattttaccatatatatacctacctatctaagattattaaaatatttataataattgatataatagcaattattataaggaatttttttcttactttaatatctaatattattagaaatatacgaactattatagatggcttagagtagagtggaatgagttaactctggggtctataagttttgtgtgtatatttagtttatcatttattttgtaaatgatattgtttatttttttcattaattcaatcatattaatcctctttagtataaagaaatatttagaaaaattattttaaattgttattcaagtatgtgttctacaagattatctaccataaaatcaaatacttcaatatagttatattcaatattttcttttaccaatagacttgatagtagagaattacaaacaccaaaggctttttctttttctatcttcaacttgagattgtgtctcttaattaagtcgtaaaaactttgtatgttattggactcaagttgtaaaaacatatcttgaggtagtttatttattaggctgatgaaatcaggattatttggtgaatataaaaatggatttttatcatataatcgatataacatttttaaggattttgcaaagccttcttttggaggcatgttacttaaaatttcatctactgatgatataagtctgttttggattccatttagtacttcaaaaaataacttttcttttgaatcaaaaaatgtatagaaagaaccctttgcgattcctgattttgaacaaagttcatcaatgttagtttttttgtatccatatttagaccagttgatttcacattctgaaattagtctttttcttatattgtctttttctatttctgtaaaacttttagccatttttatcaatcctttctatctgcatatgctatctatgactttaaaaatattttaagtcatagatatataatattgtctacttataaatttgtcaagtgatttatgtttataatatttatattggtatattggtatattggtatattggtatattgatattaaagtgtgacctatatagatttggagcgagtatgttattaaaatagaagaatctagaaaaacgttaacttaaaattttttttataggtaaacgtttatgaaaaaaagaaatgtttacataacgaataaatggctataatttaaatacacaaagttatatcagagagaggaataaaaatatgtttaatgaacttaaaacaaaagaaaatgtatataaaaatttaataaatggaaaatgggtagaatctaattcgagaaagccaatagaaatttactcaccaatagataattctcttgttgggaaagtacaatctatgacaaaacatgaggtagatgaggttataaaaaacacaaaagagagtataaaagtatgggctgaaatgcctgtatacaagagagccaatatatttcataaggctgctgatttattgttagaaaatatagatgagatagctaatatactggtacttgaaatagccaaagacataaaatctgcaagggcagaagttgagagaacagcagattttttaagatacacagctgatgtgggaaaaaatatggagggtgaagccattagtggagataatttccctggtggaacaagaaataagatgtcttatgtttcaagggttccattaggtactgttttagctatatctccttttaattatcctgtaaatttatcaatgtcaaagattgctccagcgcttattggtggaaatgcagttgtattaaaacctgctacacaaggggctattagcgcacttcatgtggtagaaatcatgagaaaagctgggataccagatggagtacttaatactattacaggtaggggtagtgagataggggattatgttgtaacgcataaaggaattaattttattaactttactggtagtactgaagttggtcagcatatatctaaaatatctggaatggtaccactattattggagcttggtggaaaagatgcggctatagtattagaagatgcagacttagattttgcagctaagaatatagtatctggagcgtattcatattcaggacaaagatgtacggcagtaaagagaattttagtacaagagagtgtggcggataaattagtcggaaaaataaagccattggtagagaagttgacaattggaaatccaatggatgaagtagttatcactcctcttatagataataaagcaactgattttgttcaagggttggttgatgatgcattacataaaggagcaaagttaataacaggtaatgttagaaaaaataatttattctatccaacattgttagataatgtaaatgttgatatgaaaattgcttgggaagaaccatttggtccagtacttccaattataagagttaaagatataaatcaagcaattgaaattgctaatcaatcagagtatgggcttcaatcatcagtatttacaagtgatattgatagggcattttatatagctgataaacttgaagttggtactgttcaaataaataataagactgaaagaggtccagaccacttcccatttttaggtgtaaaggcatctggtatgggaactcaaggtgttaagtattcaatcgaggctatgactagacctaaggcagtagtggtaaatgttagggagttgtaataaataaatagagataaagaatagtagagataaagaataaaggagttgtcttaaatttgattttttgtaattgaattttaagttcaactccttttttgaatctttatatgttatttcttagtaattctttttttattaatatcttaaactttgatattgatgaaatttgaacatgataaatatctcaaatttatagtcttgttttctaatgatgaagcctatttctacttaaatagagcaatttctaaaatgaacatttttatctcgagtaccatatacaatgaaaaaaattaaccttgacaagtgaccgatggtcgctgtatgataaataaaaaagaaacgaccattggtcgctaaaaggaggtatcgccctatgccaaaaggaattgtgcttacacctgaacaacaagcagaacgccgagaaaaaatagttgctgttgctttgagtctcatggctgaaaatggattccaaaaaacatcaatgagagaaattgcagttttagccaacatgggaaagtcaagtctatacgattttttcaaaacgaaagacgagattgttgtatatgcagttgagaaagaaatagaaaaaactatccaacaagttcataggattattgatggtgaaccttcaccacaacagtgccttagaaaaatcatgcttaatcatcttagatttccagagcagtatagaactgtactgatgtggttaaatacagaatctgattatttagaagaagagtatcgaaagagacttaaagatgctcgttatgcatatcaagatattataaaatcggtaattgataatggtgtgaccacaggcatctttcgcaaaacggataccgctcttgtgacacgtttgttaattaactccatgttatcaatcagctacacgtcacgaccatcggatagttcggaaaaaatgttggatgaaacaatgaatatatttctgcacggaattatgaatgatggaggtgaatgattatgatttattatgtcttgccactggaacataaacaagcaaccattgaaattgttggtggaaaagggatgtctttatcaaaactattgacagcaggcatccctgtgccagacggttttcatgttacgactgcttcataccagatttttgttgagacgaaccatattcagtctcgaattaataaactgctagatggtattgattccaataataccaaccaacttgaagatgtatctaagaaaataggggagcttttccataatggagaaatgccacaggaagtgtcggacgcaattaaaacagcttatgccggattagggaacatatcggtggctgttcgttcgtctgcgactgctgaagatttacctgacgcttcttttgcaggtcagcaggaaacttatcttaacatacaaggtgaagataaagttattgacgctgtaaagagatgctgggcttccttatggacagctcgtgctattgcttatcgtgtgaagaataatataaagcacgagattgtcgcacttgctgttgtagtacaaaagcttgcattttccgattcatctggtattatgtttacgttaaacccaatcaatggtagacgtagcgaaatgattattaacgctgcatgggggcttggtgaagcggtggtttctagcttagttacacccgatacaatcgtagtggataaggactccgaacgaattatatcgtatgaagtggcaaataaagagattatgacggttcgtacttcagaaggaacagaagaaaccatggttcctgaaaggttgagaaaaaaatatgctcttactcgtaatcaggtaatgcaactgatacagcttggaaagaaaattgagaagtattatcaaatgcctatggatgtagagtgggcactggaaaaagataaattgtacattgttcaagctcgtccaattactgttctgccaccggaatgggtattgccagaacaggatgttgtatacacaaagggaagtttggcagaacacttgccaaatcctgttacacctttgttcgccacgcttggtcttgaaatcgtaaaccgtgcatcggagcttttatggatagatatgtttggtaaaagtgcgaaaaaattattaccaaaaaacggcgcatatacggttattaatggatatgtttatctttctgctaaatcaaagccacttttgattgctatcaaatccctttccccacgctctttacgtaggacacttatgaacagcgttgcacgctgggaaacggcacgaaaaggatatgaggatgctattaaacaatgggaagaaaagcccctgcatacgatgaacgcccatcaaattatggatggtattcagacaatattttatgccgcatgtatttatttcacaaggattcagcttacattgcctgctgcttctatcagtgaaacattatttacaaaattatttcaaggagcagttcgacgtgctggtataacggatacttccgttttcctgcttgggtttgatacgattgctctgcaatcggaaaaggagttgtggggtctttcagaatgggtaaagcaaaataacagcatcaacctttatctgcaaaacagtcctgcaataaagatagcagaagatttcatgtcttcagttatgcctgttggagtttcacaggaagtatggatagaatggaaaaatcgaatcaataagtactttaaagagtttggtcgtaccgcttatgagtttgattttgcgtattccacaccgcaggaaacacttacaccaacttttgaatccgtaaaaacatttgtggaaggaaaaggggaaagtccttttttacgccagaccacgtttgaaaagcgtagaaaacatgcagaagaagagattttacaacacataggtggattgcgtaaaaaactattttttaagttgctccattgggcacaggaaacctctcctatgcgtgaaaatgctatttatttgatgggaatgggacatcctctgattcgttgtatgtttcaggaaatctcagaacgattcatacgaggaggagctatttcacatttagatgatatttattggctcacaaaatcggaattggaggtacttatagagcagttggataaaaacaagtctctatctgatatgaacgggataatacctgttcgaaaagctgaacttaaaaaatacatgggttatgtgtcaccgtccaagttgccagagaaaaacaaaaaaactatatcacaagcaccacagaagcagaaagatgggaaaattgtgttgacgggcattggtaccagtactggtgttgtgacggctccagcttgtgtactgaatagtccagcagattttgaaagctttcaacctggaagtgttttggttgcagttaccacaactccagcatggacaccattattttcatctgcaagtgcgattgtaacggacattggtggtcctcttagccattcaagcattgtcgcacgtgaatatggcatcccagccgttatggctacacacattgccacacgaactattaagagcggacaaatgataacggtggacgggttggcaggtacggtgacgtttgatgagtaaaaagcctattttcgctttgaagctttcgacctttgtgattgcgttagcggaagtagtaatacttaaagttttcagatttcataatactactaatacccaccgaacagcggtaagaaaaaccgtagcttggtgggtattttcttatgcaaaaaaatgagaatgtctcaaaataaaaatttgattagaaaaaatcaattttgagacaattcctttatttgttgatacaataatacacttataataagcaattttatattgttaattggaggagttttgaaacataagtttttcaaagtcttttatttgcaaaggtctagagaacacgtatccttgtaacatatcacagtttatttcttgcaagaaatctttttgaaaactggtctctattctctcagctacagtggtcatttttaactttttagctagttcgattatagatacaattatatttctttcacgttgagaatctaaatcttctgattgaaaaaatgctctatctaattttaatgtatcaacataaatacccttaagcatattgattgaagaatagccacttccaaaatcatcaatagagcatttaaagtcatttttatgaatttcatttattatttcactaaatactttgacatcttcaaatacaattgtttctgtaatctcaatttctataaggtgagaaggaatatcatattttttagctattttatcatatttcttgataaaattcttggatgaaaaatgataatgagacatattgttttaccaatgtcgttacatctgaatatattaaaagatatataggcttatcatcttcccaatctatacattcagctacaacttgcatgtgaaaaatatctccattaatagtttgtggagaaatagaaaaacaaacgcatctcccagatttaaaatcattatgatatttatacacattgttaagataaccttctaaatttatatcatctaatagaaaatttacattatctttgaacatatcaaaatattttttattagcatcaagaagttggaatccaaagtcagttaccttaaacttggcaatgaggcctggaaaattgttgtatagaatatattcaaagcaagatatgtctcatattttagaataatcttattatatgtaaagttaagctattttataagtctttttatccagttatgcatttttattgaccagttagacgtaatatattgaatattaagaaaattggtactatcatataaataaatatatatataaaggaggtttttatatgagtctttttgttggtggatggtcaaaatttagggctgtcgaagaagaagatttaaaagtatttaatgaagctataggaatgctaaaaggggttgattatgaaccacttattgttgctactcaagttgtagcaggaacaaattttaaatttatttgcaatgctacttcagttacaaatcctccacatgattatttagcagagataattgtttttaaacctcttccttgtgatgaacataatgcaacaattacaagtattaatataattaagtaatattaataggaggtggaagatgagactaaatgtaactaaacaaaatactatagaggttgaaaatagtagaaaagaagatgtttattttgtaatagttgataatgttttttttgaacgtcaaggtgatgtatttaatagtatcacgaataataatttaaataattatgatgtaaaaatattaccaactgataatgtttttttagaattaaaaataacatctactaaagatttagaacctgtttttattgtagttgaagatagacaatacaatcatggtagtataatgtttaagccagtattggtatagaatttaagcaaataaaagtgaactattcaagtaggtataggtgaactatttaaactaaaggaaacctattaaaccagtatagttgaactatttaagcaaataaaaataaaatattcaagctggtataggtgtaaaacttaagcagtagtataggaatgtttaaattaatggtacaaatataattaaaaatctatatgtaataaccataggaaaatagtggacatataatataaaaaaacaactgtattacataaaatacaataaaataagcgcattaaataaaataactgtgttggtaaaaattatattatacaacacagttattttaataaacaaagaagaataattattgagtgaaaatgcaaatttattaaaaataaaaaacaaatttaaatatagtctaaaaactttgtaatctacttaagggattaaactttatttaaataaaatatataaccaagggggaaaataaatgccagaaaataacaatcaacttttagaagaaataacactcttattaaatgaaggaaaagtagcaataaataaggctgaaaatcaaaatttaattctaattcttggtgggacaggatgtggcaaaagtactgcaattaactatcttgcaggatgtgtaatgatggaagtagaagatgaagatactggtatatcatatattgattgcttagaccctgtggcagagattggttcaggagctgtttctcaaactttatacccaaacattgtaaatatgagaaaaccaatagaaggaatggatgcaaaattatgtgatactgcaggttttagcgacaataggggagtagcccatgatattagtgcagcagtttcattaggtgaagtatttaaaaattctgcatctatatgtgcagtaattgtattgattaaaaaatagctacgcacactcgtgaatttagtcatgagttagtagctaaaatagtcagcatatagggaaacctatatgtagagataggatagagcctatccaatactacttgaattgctggaaacccctaaagctaaccaaactaaaacataaggatgaaataaacctaagtgtgaaagttacgaaagtagaaaaaattggttagatggtataaggttaaaccctaagtactttaaaatgggcaatcagcaggtaagctccgaataggagaaacttcaacgactattcctcttgagggaagtacactacaagctattggtagtggaagtgggtagaccttagcggataatgccgaaggataagatatagtctgtgcttacatgaaagtgtaagaagttcataagagaactgcataggtagtagcgaacttatgtgaacgacaacctcaaaaatgataaaagttaagacttacggttcttaaatatgttatttaaaattaaatataaaaccttctaaataattgttttaaataattacatttgttaatattatgataggtgattaataaattgttcaccacagtattatacaatatattaaatatgataaaatcattaaaatgtgtatcaaaaaacaattagagtgaggtagtagtagtggaaaaagcttataagtttagaatgtatccaaataaaaaacagcaagagttaattaacaaaacttttggatgttgtagatttgtatataataagtatcttgctaaaaaatagaagtttataaaaatgataaagaaacttttacttataaacagtgtagttctgatttgaccaatttaaaaaaagaattaaagtggcttaaagaacctgacaaattttcactacaaaacgccttaaaagatttagataatgcatataaaaaattctttaaagaaaaagcaggatttcctaaatttaaatcaaagaaaactaatagattttcatataaaactaactttacaaatggaaacattatgtactttagtcaacatataaaactacctaaacttggtatggttaagataagggataaacaagtacctcaagggagaatacttaatgctactatatctaaagaaccaagtggtagatattatgtatcattatgctgtactgatgtagatattgaagcatttgaaaatactaataatcagataggtttagatttaggaattaaagaattttgtatctcaagttgtggagactttatagaaaatcctaagtatcttaagaagtcattaaacaaacttgctaaattacaaagagaattatcgagaaaaacaatcggtagtttaaatagaaataaagcaagattaaaagttgcaagacttcaagaacatatagccaatcaaagaaatgattttctacaaaaactatctactaaattaataaaagagaatgatattatttgcatagaagatttacaagtaaagaatatgattaaaaatcgtaaactatctcgcttaatttctgatgtatcatggtcagaatttattcgtcaattaaaatacaaggctaattggcatggtagacaaattgtaaaggtaggtaaattctttgcaagttcacaaatatgcaataaatgtgggtataaaaacgaggaagtgaaggacttaagtataagagaatggatttgtcctagctgtaatgaaactcacgatagagatataaatgcaagtataaatatattaaaagaaggattaagactaataacaattcaaaataaataacttatgtaagaaccgtaggaactacggggatggcctgtggagaattagtaagacatattttagtatgcaaaattctgtgaagcaggaaccctgtgactttagtcatgggaggttcagaccagaagcagatatattagattctagacttacaaaagtactagacctgtttcaacagttaaatatgtgtcttcataaagacaattttaggggcagtataacttttttcatttcaaaaagtttcttaggaagaacagaaaaacaaatatataatgttataaaaagaaaatatgaacaattatgtgaaaatttagatagtaatatagaggaaaaagcttggttatttgaagaattgctaaaagataatggtaaaaatattcatctttgtaagccacttgaatcagacgagagggaaggcttattaaagcaagtactagaattagatgaagttaaagataagacatcagcattccaatatccaattagtgcagatgcaagattagttttagatacgttgataaaagaaattcaaaacaatatcgtatctagcctagaagattatgttaaggcgtatacagaagattttatcagtattattggaagtataacaatgattcaagaaatagcaaaatatgatgaggttgtaaaagtatttaaaaactggttggaaagtacaacaactcttactatagagagatttatcaacgtattagccaaacaaagtggcttattcttacaagatagttgcatggaattacaaaataagataaaaggaaacttagatataattgatgctttaagtaaatatacagaacatggaactggggaaattttattaccttctgtacatatggaatttattatagaaaaggcaagtaagaagataatggaacaaaacttcattataataagaaagaatttagaaaaagttttagtttcttatgaagtacaaaaacaggtatttacattaccaaatagagaaaaattaatggaagttgcaaataaaaaggattatgtatatagtgtaagtgattttaattcaattttgacaaatgttacagttacacaaaatgaagagttagaagacagtataacaagattaagtgcatatggagaagaaggtaatgagataattagagaatttattggtaaatacattttaaatccatttatagtaaaaacaattaatattaatgataagaaaggtattgaaataagagcattaattccaaacttagtaattagtagtgtattggaatatttcaaaaatagaaaagtagatgacaatgtttctacatttatgttctttgccaaagatactatttatatggatgataaccttggaatggactttgcatcagagaaaaatattattcttgcttgtaacaatcttgatgtaggtagtaatgtaaaaattaatgtaagtggaaagagcggagaacttgtagatagttctatgtatgggaaaaatggtgaagatggtagagatgcaggtaatatttacttatatattaaagaagaaattagaaattatcgtttaacactgattgcaaatggaggaaatggttctaaaggaatagatggtaaaaatggtgaaacaggagattctggaagtaatggagctgatgcaggatatacaagtagtttccatggacagatgtttaaagggtattttgcaaaaggtacaagtggtaaaaaaggtgacaaaggtggagctggtggaaatgccggaagaggtggaaatgctggtaataaaggtaatatttacttcatttcagactcagaggaacaaaaaaatagaataattaatcattgtgatataacagtgaaagatggagaagcaggtccaaatggtagaccaggttcaggtggatatggaggaagtggtggctatcacggatataatacactttcattttctccaagtggtatagataagactgtttactatacaggatattttacaagttgggattataagttagatagtataattaaatatcatatagaatttagtggcggaagttggaatgaaggcaaaacaggaccagcaagagaatacgctgaatatggagatagaggagacgacggaggatttaatgctccaaatactaagttatcaacagctgtttcaaaggtagaagagaatcttattaaagaaaaatatcaaggctattgttccgaaatatagaaagggatggatgtatggcaaataaactttatagtgaaatcgtaaaccttttggaagaaggaagagacgagcttagaaaatatgacttaaaagaaaagtcaattttgttattcttaggtgcttcaggcgttggaaagagtacttgtataaattatttaaaaggttgcgtgatggaagaaaaaacggatgaagagactggacaaatatatataactgcaaaagattcagctgtcgaaattggaaatggtgtatattctaagactttatgtccagaagttgtagatattgcaaatagaaatttttcattatgtgattgcccaggtttttttgataaccgtggagcagagtatatgattgctggtgctatgcttgtaagggaaactatttctacatcttcaaaggtgaaagggatggtagttattttagactatcaatccttactggactctagacatacattattgatagaaacaggcaaaaatttgaaagatatgcttggtgattatgcaaagtataaagaaaatttcttctttcttatcaataaaatacctaaaacactaatcggtaatgtaacagaagaaaaaataaggaatatattggaaaaagcaaaagaagacctagatagtcaagagaaagattacgacggttgtaaggaattagtgtacttattaaatgtagcattatcagatggtgtatctattaaattatgtaatccactagatagacagccagaaaagttgttggatgaaatgaaaaatctacctgaaacatttgaaaaaacagatttgggattgatgcttactgcttcttgtaaaatagaaatacaaaaagccgttgatgtaacctataaagacctagaaaaacttttagttccttatatagaaagtgtcaaaaaaggtatggaagattctatttccattctatcttctataaatagtctaaaggataaaaagactcaattagataagatgtatacagatttatgtagtaggactaataatatgaaagagcttatggagtttgtacaagaactttcatatggtgatggcgtacagaaagtgaatatattagaagaaacacgtcttcttttagagttaaatagctactgtagtgagactcatattgttggtctaagtgagttgttaaaatcattgctaaaaaatactttagaagatacattaaaagatatcaaatattggatagcagaagaagaatatagggaagaagaagccaaaaagcttgaagatgcagagtataggatagagaagattcaaagttgtacatatataaaatcatatgagaaagaaaatgtactttctatatatattcctatacctaaagtgaatttatcggatttgactaaaataatatctggttatcaacttaatattttgtcatctatatatatgtatggagattgtgagttgaaaattgactgtaatatggagaaagaagtcttctcaggtaagaatattgtactacttacagaaaaattatgtataccagaagggatttattcaatcaacgtatctggtaaggatgcagaaaaattggttggagaaggttctatttacgacggaatgaatggaagaaatggcaataatgcaggtacttcaggtgatattttattatcttttaaagaaatagaaaaaagaggagaacttaaactttacgtagatggtggacgtggtggaaatggacaagatggaaaaagaggagatacagggataactggagaagctggggaaaatgctaaaataggttctaaaaaagagtcaaaagaatttgctaaggttaaaggtacaaaatactatgtggtaaaagcagaaaaaggaaaacaaggtggaactggaggcacaggaggtaatggtggaaatgcaggtcttgggagcaagtctggacaggtttatctccttggaaaagcttctttattaaaaggtgctataagtaaaaaagatggaaatcatggtctagcaggaaaaggaggctctggaggagctggtggtgcaggaggtcttggtggaattagaggtatatatgaagaaacaataagatatataggtacctctgctccaatagatgacagtgatagaaattactattattttgatagatatgtgtttaatcatgcttcaaatgagaaccaagtagcagatgatggagagaaattaaatgctctttatgaaaaacataaggactggacaattagcaaacgtgaagattcaggtttagtcggagcagagggaaaagacggtcgctctggagatgcattaaaagaaaaggaattgttaaagcaggagtattctttgtcaatagataccttcttctatgaatttttcgagagatttggtttttctggaattaaaggttatagaaatcttagactgttgtgtgcagtgggaattttagaagctgatattttagaactttcacatatttatgaaatttttcatgcagttgagaaaatagagatgcaattaaatagagaaatacttcagaagtactatagttttgagaagaaaaataaagcagtgctttctctggatgatatgaatataaagaaagaattttataaggaggcaaaggaaatctatgaataccttataaataaattgatgcagtctgatagaatagaatcttttataggagaaaagaagaattttagcgaatggagtatgattttatttgcacttgaacaaaaaacagcattctatgtgcagatgattgaagaaagtgaaattggaggaaatcgtgttacagatattcgttctttgacagattatctggacaagaccttaagagaattggaacaaggaaagaaagatgagttaaaagaaggatatttcaatacttataaggaaagtatcctaactcaaattgaatctggaaatcaacaaatagaagttttaaaagatgaacttgagaataaaatgctttctgttaatgcaaagatgaacctgttgattcaagaaattataaagatgaaagaagaggagcaagaagacatagaggaactaaaaaagaaacaggcaaaacttgaggaacaaatgaaaacacagttaattctttctggaatacaaagcgcattgagtttactgactgcatttagtggtgttggtcaagcttgtctaggggcatttgacagtgcaaaatctttgaaggaaaatctttcagctaaagaagaggaataccaatggactaacaggatggttgatttttcagattttaaattggattctgatggtatgagatttgtacttggagaacagctaagtgaagatagaaaaaatgctttagataaaatgacttataatttggcaggtgttgatgaagaaagaagaactaaatttgaccaaattaaggagattatagttaagtctatagatgatgataactatgcagaaaaagctgacgatattcaaagagcaaaagaggggttaagtgaaagcgagtataaggaaatttacacaaaaatccagaaaaaagaaataggtatgttggaggcaaattacaataataaacagcaaaaagataagttagctgcactagagaaaagtaaacaagctattgaaagacagcaaaagacatctaaaattaaaaatgcattgagtattggaagttctgcttgttctcttataaatactgcgattagtggtgttaataattgtcttaatgtaaaatctagttttgagagtaaaatagaggtagttaaagaggcaattaaagataaagaaaataatattaagaaattagatgaattgaatactcaaatggtggaatttaaagataaaactttgaaagaatctgttataccatttgtagaaaaattcgatagtacagttaaaaatcaagatatttttgaaaatgagataagtaaattaaagatgaaggaagttttaactgaattaagcacaaagtttggaagcttaaaaatggaaaattcagaggagatttctataatatttaaaaaagtacaggatatgatggaaactcaaattatcattactgataagattgataagaaaaaagataatcttgcaatgggagaattgatttatcaaatgtcaggtagtggtaatcagatgaatgaatatcagaaaaaacttatccatcaaattgaattaaatcaggttagatatttgtgtcaggttgaggcagcagcttttcaactatggacgtttccatttggaagcaatatagtaaatatcttaaatagatgccatgtaggtattacagaagatgaaaacgaggttataaatcaggcgaaagagcaaaatagacagattagagagtttcttgaccaagatgcttaccaatggcaaaaaacggataaccatattttgaaggtagcattaacaggcagtttagatgggaaatcacgtgtgggatttgaaaatacatattctctatatgattgtaatgaagaagaagtgaaaaagcttttgacaggagatgaaattagttttgaagttccattaaataaaaactttgatgccataaaatatgtaaccatgtatgcaaatatcccgaaccttagacgaaatattttagaggatagtttaaaagtaaaggtgcatattcatttatatgatagtggatacttctccctatatgatgataaaaaagatgtctattatcaatatgtatttccacaaaactatatagatattacacatggtcttgatgttaaatacaatgattcagattcaataaactcaatatggtcttcagtagaagataaaggaattgaaaagttcaaaaatgcaggattaaactctggtagaagtccatattctatggctaagatttctttgaaggcacattttaataagaagctttcttatgattcacttacaaatgagcagaagaagaaactagaatcatactttgataaacctagtaagtatgcatggagcgagagtatagatatattgaagagtctagggtatattgatttgaagggaattttgtcaaagagttggtatgaaatcaagaaagatatagatagtgatggggagattatgaagcatttttctatattacaagttgatttattggaaagaattatttatgagcagactagtatactaaaggaaaatatacctaatttgacaattgaattggtaggctgtggtatttatgtagagtctgaatttaattatctaaagcaaaatgatttaaaatgctatgaagaaagattggttgaaaatacaattatttgttgaaaatataattaatatataagttttaaagaaatttacaaaaggggatgtttcaaaatgaaaatttgaatcatctcctttttgtaaaaaatagaaataagttgagtttaaaatttgtaaaatatgttttatataattttgattagaaaaaagctccttttaagacagtttctttttaaaagatgaattataaattttttatatacatatgttttatataatggggattaatagtagttataagtattggtgttttccaataaatttgtcatactgtttaaacttattccaacagtagatgcgttgtgtaaaaaggcagatgtacttggtctaacaaatccacttacgccaagtaaaatcagacctaaattaaagccgataataaacttagaacttaaatcaactcttttcataagcttattactaatctgctttaaaacgattaaattattcaaattatctgctgatatggtaatatctgaaatctctcttgctatttcagcaccttcactcattgcaattccgacatctgattctgaaatagcaggagaatcattgattccatcaccaatcataattactttgcgaccttttagtttttcacttttaacaaaattggctttgtcttctggtaagacttctgaataatattcatcaacaccaactttacttgctatagatttagctgttttttcgctatctccagtcatcatcacaatcttttttattccatattctcttaaatttgaaattacatattttgcttcttttcgtaaagggtcatttatgcaaataactgctgataatttacccgatattgccataaataggtgagaatactcatctgatagattgttgtacttatcctcctcaccgtctgggatagtacacttctcatcttcaaatacaaaatgtttgctacctattacaacctttttatcatcgacctttgttgaaatgccatgagcaataatatattctacctctgtatgcatttctttgtgactaagcccttgtttttcagcttcataaactactgcatttgctatggagtgtgggaagtgttcttctaagcaagctgcaagtcttaacatatccttcttattataattttggaatgtaattatatctgaaacagttggttgagcttttgttaatgtgcctgtcttatcaaatacaatagtatctgcacatgcaacaccttcaaggaattttccaccttttacagcaatgctgtgattgttacattctctcatggctgatagtactgaaatagggatagagagttttaatgcacaagagaaatctaccatcaatatagagagtgattttatagggtttctagtaattgcataggttaatatacttcctaaaaagctgtatggaactaatgtatctgctagatgttcaaatttactctctacagaagattttagtttttcagattcttcaatcatagttactattttctggaatctagtagtaccagctttttccttgacgcacataacaatattgccttgctctattccagttccagcatatatgtaagagccttcttttttgttaactgcaagggattcacctgtaagtgatgcctgattgaccattgcttctcctgatactataactccatccaatggaatcatatttcccatagttacactgactaaatctccttcctttatctctgaaattggaactagtatttcagtggcatctttttttaaccatactttttcaatgtttagtgacatactttgagccaagtcgtctatagatttttttctagtccattcttctaataactcaccgataccaagaagaaacataactgaaccagccgtattgatatcttttctaaaaatagaaatacctatagcagtggcatctaaaacagaaatttctatttttttatttagtagggaagagagaccttttttaaaatattttatagaatgaagtccaattaaaaaaaatcttaaggactttggaaaaaatattttggagatacttttgactagcagtttatttgctaatttgtctctataataattgtttaattccctgctggtatgttcaggaactaggttttctattttgctattgttaaaactgaatttagtgatttctcttattatgtattctctttcaccagtgtaataaatgactgcatcaccagttctatcgtaaacttttgctttggtaataccatttatagaagttaaataatataagagagtatcggactgcttgttgtttaatttgccaagttgtaagtcaaagcgtatacgacctcttatttcgtgttttatataaaaattcaatttacttcctcctgatattattaatcataataatcattaaatttattctgttgtacaagtattatttttttcttcaattacgttatctttgatttcttcacatttaatgttattagaattagtatcttctacagtttttatagtttcagttttaagaacttcttgttcgcatttaagagtatcttgtacaacgtttaccttagatgtagataagtcttcttgctcgttgatttcttttgcttcagctaaaatatcttctacattttcttgaattttcgtagttgtttcaagaacagaatctttaactttcaatgctcctgctgttgcacgagtgcaagttttttttacacagtcacttgaaagtatcttaacacctacagtaccaaaaagtactcctcctaaaaatattcctgtttttttcatttttaaaatattcattttacattatcctttcatttagttagattttgtttatacttatgtataaggtaacaaatgttaaaaatagagtatgttttacaaaattagtttagagagtttagtaattttatttgatttatattagtaaatttacatgaattttacatgtgtagtttatatagttgaaataatttttatatagcttatatatgcagtttatatatctagtttatatatctagcttatgtatgtaatttatatatgtagtttatatagttgaaataattcttatatagcttatatatgcaatttatatatctagcttatgtatgtaatttatatatctagcttatatagttgaggtaatactttatatagcttatataatttatataaatttataaccgaatactacacagtttatacataacatattgtttgagcttatctagttcatataaatttataacttatataaattttttgtactttgtattttagaaagttcttgatatttagtccaaaaactttaaaatacagtaaaagtaataattgttattaatagatttgtaaaatcatatgacatttattaccatttatgcaattaagtatagcatgtgtaaatggtattttcaacagaaaatgataatttatatcaattaatttagttgatttgtaatagagcatcaaaaagtatacttatttatatatgggaatgaaaggcaaagttttagttttttcaattaaagtgcgttagatatattattataaatgaacattattttaagtataataatgattaggagggagtgtttatgatgtataaatgaataacaatatagtttatgattgtaaatattatgtaaatataaaagttacttaaatggttttaggaaattgatattattgtgtctgggagattgtacttacttcaaaaagaggaggttatgacaagaaatgtgttgtttgacatttatacaagcagatattagaatgaaagaaagttaatttatatttctttgttttaagctaagaaggcgagctaggcaatttaaaatatattgaatggagaaaaactatgaataaaaacaacaatttagttattatatgtatgtttataggcatgatacttggaatggctataggttgtgctataggtatttctaaaggaaatgtgggtatcacaatgtgttatggtctaatttttggaatgataattggcatatgtatagggactgttatcaaaaattctaataaaaaagaataaatgaattttgatttactaggatgtttagttatgatttatttatgataaaactttttaattatctgtaaaaagtagaataagacatactaaataagatatactaatagatattttttatattatttttttaatatggaaagaatggaatttatatacactatatttaaatcacaaaaaataaaagttaattttgtttaggtggagatttttttgctcttatatattgaataatatcaagtaagtctgcatcttctaaaatacgatacttaatccaacctccattattgccacaagtataacgagtgacccagagttctttagcttttggtgtcaaagataccaacgttttttctactgctggaacttgcttgtcacctatctgaatcagaacagtaaatgcacctttttcaaaaaaagcataaaataaatgaaaagatttatggctatatttgtaaccccaaccataattgtttccaaaaggaaatcgaagttctcttgataaattatattgagtttccaagtaagtttccaacttacacaatcgtgcatatccatctttacctatatattctattatttgagacaaacagggtttattgcttttatcaagcatacgttcatacattataatttacctccatttttacttttaattatagcaaagtaattatgacaacagtatgtcaagtttttatgtcttattatactaacatgtaaaaatataaagtaattatttttagctaatagaaaaatatgatatttatatatattggaaaaaaatgtaaaataatgataaaatatagtttataatacaaaagtataattacattataattatatgtgtttagttggatttgtgtatttaaataatgtataatttatgctgattactgctaaaaaagcataataatattgtattgtaaggttttataaacttctaattgaaaggggataattcaaatggataagagatatttagaatccgatgtatttgaagcttttcaagaaagactttcttatctttttaatgaatttgattatatctatgtatcttttagtggaggaaaagatagtggcttactgctaaatttagttttggattataagagaaagaataatataagttccaaaataggagtatttcatcaagattttgaggctcaatatagtttgactactgaatatgttgaaaaagtatttgaagagaatattgaagatattgaaccatattgggtgtgtttaccaatggctacaagaactgctgtaggaaattatgaaatgtattggtatccatgggatgatgagaaagaagaattatgggtaagagaaatgccagtcaaagaatacataataaatcaaaaaaataatccttttacttattataagtataaaatgagacaagaaagtttggcaaagcaatttggtagatggattagagatatacatgaaggtgcaaaagttgtttgcttattaggaacacgagcagcagaatctctacaacgttattgttctattgtgaataaacagcatggatataaaggaaagtgctggataactaaggaatttaaaaatgtctggacggcatctcctatatatgattgggaaatagaagatatatggttagcccactataaatttgattatgactataataaaatttatgacttattctataaagctggagtagctccaagaaaaatgagagtggcatcaccttttaatgattcagcaaaagagagtttaaatttatacagaatattggacccagatgtatgggtgaaattggttgctagagtacaaggagttaattttacttctatttatggaaaaacaaaagctatgggatatcgtagtgttaaattgccatatggacacacatggaaaagtttcacatattttttgcttgataccttacctgaaaatataaggaatagctatattaaaaaattttcaacatctattgagttttggcagaatacaggtggtggtttgtcagaaatagttatacgtgaattgttgagaaaaggttataaaatagaattaaatggagtttcaaatcatacaaaagataaaaagagtagagtcatatttttggatgatatacctgatgatacggatgatattaaatttaccaaagatataccaagttggaaaagaatgtgttattgtattttaaaaaatgaccatatgtgtagatttatgggatttggtcctacaaaagaacagagaattagaacggaatatattaagaagaaatatgaaaaaattcattagataggagttaagatgctatggaatataaaagtcctgtatatggaatcatcgcagtgccaatcgaaaagatagaatctaacgactataatccaaatgcagtagccccaccagaaatgcagttgttgtataaaagtataaaagaagatgggtatacaatgccaattgtctgttattataatgaggaaaaggataagtatattattgtagatggttttcatagatatagagtaatgcttgaaaataaggatatatatgatagagaaaacggacttcttcctgtttcagtaattgataaatctcttgatgaaagaatggcaagtactattcgacacaatcgtgcaagaggttctcataatgtggatttaatgagtaaaattataactgaactttgtgaaattggaaaatctgatgaatggatatcaaagcacctgggtatggaagttgatgaaattcttagattgaagcaaataactggattagcttatttatttaaagataaagagtttggtaatgcatggattccctttggctctgatatagaagaagaaaattaaagagatttattaaaagaaaaagatatattaaaaagagaaaatttaaaatatatattgaaaataaagagctttaatattatatataagcacagaaaaaagagtaggaaaaatatcctattctttttttatttttataattatacttttagaataaataaaactatataaattaatgtattttaatataaatttatttgttaaaaatagtattaaattgtatatttatatcgtttttaataaaaaataatcacattttatttaaaaatgaataatatatagtaaatagtaattaagttataaaaaattgtataaactctatattatttatttaaaatagatatttatgaaagattaattaggaaaatttttataggtaaaataagaacaaaaaaagatacttatttaattatttaatcttattaaagacctattaaaactactgactataatatagaacaagtatacaatttttaaaaataatgctattttaaaattctaaaaattaaggaggataattaatgggatatttaaaagaggataaacaagactattgttgtgaatttgctagaccatacatcaatcgtcaaatttatgatgacacatacaatccaaaaacagcattaaaaagaggtactttatttcctgaattagatttaatagagtcaaataactataatgattggctatattcaaatcctaaaaatagagttagagctaaaaaagggggtaacatgtactaatgtcattaaatagaagagaacttttagagagaatttcagaatatcaatttgcctgtatagaattaaatttatatttagataacaatccaagggataagaaagctcttgatttatacaatagatactgcgataaatttacacaagctgtgtgtgattatgaatctaaatatggagcattaactaattttggatatgaatcaagtgaatatccttggtcatggatatctgaaccttggccatgggacaaatcattttataaataaaattattaagttttaaaattagaattattattaaatatatattaaggaggagtaagataatatgtggatttatcaaaaaacactggaacatccagttaacataagacaagcagaccctagaatggcaaaatatatcatgactcagttgggaggacctaatggtgagttggcagctgcaactagatatcttcaacaaagatatactatgccaactggaaaatctcgcgcacttttaactgatataggtacagaggaaatggcccatgttgagataatttcttcagtgttatatcaattaataggcagttgtactccggaagagcttaaggctgctggacttggtagtaattatgctaattttggacatggtcttcaaccagtagattctaatggagtaaactttactacaagttatattaatgtctttggcgattcggtaactgatttacatgaggatatggctgctgaacaaaaagcattggctacgtactatcaattaataaatttaactgatgaccctgatttgaaagatatattgagatttttgggtgagagggaagtagttcactatcaaagatttggtgaagcattaatggatgtttatgagtttacagagtgtaagcatcagttctaattaagtattaaaagtgaatagagagtaagcatcaattttaatgaagtattaaaaatgaaaagagaataagcatcatttttaatgaagtatcaaaaataaaaagagtgtaaatattagctctgataaactatcaaaataagaggtaaaggttttagttgatttcttttatctcttattttttattgattaaacagattactttgctatttaaatatattattttagcaaaaaaagtccaatcaaaagttcaaagtattaccatagttcaaagcattgccgttgttagtaagttttttacaatattttttatttactctttggataatcaaaagaaataaaaaatcatatctctttttttatatttctgtacacttttggagaatatcccgttttttctttaaaacatttactaaaatagattacttaatgaaaaacaacttttatatcaatatcacttattagctcatctgtaccctttagaaattcagttgcttttaataagcgaaactcagtaaaatatttcttgatgttatatcgatatttttttgtctatttagtgataaaattataatatacacttctataaaagttaatacagtaggaagcttaaatgtatgaattttatatccatcaaagggaaaggaaaaaaaggatgaacagattcaggtaaatataaaactaatatgatatgaggatagatattataacgaaagtgtagtcagaaggaaattatattagtatgtttttacataatggcagatagaaaagaagtgtctaatgatttgagtgaagttttcagaatataaggaggaattgtatgcaatatattagctattaccatagtccaattggaaatattcttttagcatcagataatgttgggttaactggtctttggtttgagaatcaaaagtattatgcttataatcttgaccaagaacatcaagaaaaagaattgccaattttcgagcagacaaagaaatggctagatatttatttttcgggagaagagcccaattttacaccatcactccatatggtaggtactcctttccagactacagtgtggaaaattttacaacaaataccatatggtaaaacaatcacttatggagaaattgcacataaagttgctcaacaaaaaggaatatctaaaatgtcagcacaagcaatcggtggtgcagtagggcataatggaatctctattattgttccatgtcatcgtgttgtaggaacaaatgggagtttgacagggtatgctggtggaattgatagaaaaataaaattgttatctttagaaaaagtatctgtgcaacattattttatcccaaagaaagggagtgcattataaagccattaaatttagaaattcttaatcatttatttgatatataaacatctaattttgaaagcaataacttgcaattttaaaaaactattctttaaactatatgttatacaaccttattcctagtaaacattatataactttagaggtagttttagagcttgtattttggaagtttattttcttttttcgtgtgagtagttatatgtttagatgcagtaatttatatgctacaaacaggaaaacaaggagcagacaaaaaatacttagataatatgttctttgtgaaaggttatgttgaagaacttctatttttagataacagttatgatattgtattttcatgtattgtatttcatcattgtacaaatgttcaaaatatattttgtatattttggaaatggtaagagtgttaaatataaggggaaaatttataatgattgatacttaagctactcattaagtattaagaaccatacaagataaggttgaaatttatatgcttcgttttatgtaaaaaatgtaagtgagttagaaataaaagaattatttataaaaaatagattaagtattggaaaatatgaaaaatagatgttgaacaaaacttagtcgattggttaaatttaaccaaacacttaaagtatcaaaagaaaaaattattactcttaagcaagaagatataaatggaaaaatgaaaacaagattttatccttttataagtgataaggggatatgttttaatcaaagatggacttttattttaggctgaaaaattatataactatattatagaatataagggagatacacaactttttagtgttcaatctcccttattttttattattatatcaagactcatttagtcgtgttaattttaggataaaatgagtattttttaataaattatttataagtaaagtgtgttgtcggataatcagtatttctgtataaaatttggtataactttaaagaagtatgtgaaattttcaggtattttttactatggtatattatttaactgattttaatttagcaatatcattccaattcttagatgtgactatctctatattgtttaaatcatttttaatatctgatgtatcttctactaatgaagaggtatgtttaatcactgtatctaatgtatttctgttaatttttacatctgacttaatttctgtaacatcactctgaattgtatcaagtctactactagtttcaacttgtccagtttttaagtctttaatatcaggttccatattgtctaatctactattgacttctttaatttcaccttgcatatcagtaatactgtcttgcatactattaatagtgccatccatactactgatactgccttgcatatcgctaatagtaccttcgatatcattgatattgctttgcatatcgctaatagtgccttcgataccattgatactgccttgcatatcgctaatagtgccttcgataccattgatactgccttgcatatcgctaatagtaccttgcatatcgctaatagtaccttgcatatagttaatattaccctgcatatagttaatattaccctgcatgccattaacagtaccttcgataccactgatactaccttgcatattactaatattaccttgtatttcctgtaataattctaatattttttcatccatcactatcacactcctgttttattattataacataatttaggtgttatattccacaaacgctatgtcatatttaatttttaatcatataattatctgctattcaaaacatggttaaatatatctatattgagaacttttttattaatgaatcttgtgtattgtctaagtgtctaagatactataataagtgtttttgaggcatatgtggttatatttgtatttaaaactgctggtaatatcataattgattacttgtgtttgaatattttgattagtagcttcctttttatttctttttattcttagttttaaactttcatatttccttgaaaatttattggcaatgaaagtgcatgaattttttagctattttttatgttacaatatgaatatataacaattcgacaaattggatttttgaaaggagtaaaatgttatgaaaatgccaaaagagagtattgatacgattatgtttgctccttgtggaatgaattgtatggtttgctataagcattgttatcacaaaaagccatgtgctggttgtttgaacagcgatacaggaaagccagaacactgccgtaagtgtaaaataaaggattgtgtctgtcaaaaagggttgttttattgttttgaatgtttcaattttccttgtaaactcataaaaaatcttgaaaaaagttataacaagagatatcaagcaagccttatggaaaatagtaaatttgttcagcagtacggtttagagaagtttatgcaaaagcagaaggagagatatacttgttctaaatgtggaggaattatatctattcatgatagggaatgtagcgagtgtcaagaaaaagtgaaatagctagatcactgtttatcaagatagaaaaaattgtaatatatatataaaggtggattatattgaggtggtatatagtgataggtttaaaatgtggtatggttaaattattggaacatcagatgatatgggataaaagtgcaaaagatgtcattatattattgaaaagtatatgggataagactgccattgatattcaacacattggaagcacttctattcccagtattagcgcaaagcctattattgatattgttgtaggtgttgcttctttagaggaagctaaattatacctcgaaaggttagagcaatgtggaatcgtttttcgaggtcaggatgtaccaaaacaattactttttgctatgggagattttgagaaaaatactcgtactcaccatattcatgttgttgaatggaatagtgtcgcatggaataattatatcaattttcgagattatctaaatacttttacagacaaagcaaaactctatgatagtcataaacaaaaattagcattacagtttgaggacaatcgtaaaatctatacacagagaaagcaagaactaataaatattttgctggaataagcacgactgtggagaataaatacctaaaagaataaatttacatttattgagaaattgaacaattattttcttatatttagtaaataaaaatctatttttgttgattaaaaaatatctgtacacactcatgactttagtcattggaggttcagattgtgtagaattattggatgaaggaggaacagtatgaaaaaggatacatctcatattatcaaacgggcagagcactttcaggtaattttgattggtgaaggacttatggttggggctgtggctggtttgattgtgcttttatacaggatacttttagggcaggctggtacttggcttagccaaattttaaaatttgtagaaggttctacaataaaaataatagcttggtttgcagtacttgcagtacttgcgtggattgtatcaaagttggtggactgggagccaatgatttctggaagtggtatccctcagcttgagggggaaatgacagggaaaataaaacaagtatggtggcgagtgttgcccacaaaatttattggaggattcttatcacttatgggtggtcttgctttgggaagggaaggtccttccattcagcttggtgctatggcaggtaaaggtatttctagagctcttgaccgagggaagacagaggaaaaattcctgttaacctgtggggcaagtgctggattatcagcagcctttcatgcaccactggcaggtgttatgttttcacttgaagaagtccataaaaacttttcagtatctgttttaatttctgtgatgacagcatctttgacagcagactatatttcagccaatttcctaggaatggagtctgtattccagtttgattaaaaaatagctacgcacacttgtgactttagtcatgagttagtagctaaaatagtcagcatatagggaaacctatatgtagagataggatagaacctatccaatactacttgaattgctggaaacccctaaagctaaccaaactaaaacataaggatgaaataaacctaagtgtgaaagttacgaaagtagaaaaaattggttagatggtataaggttaaatcctaagtactttaaaatgggcaatcagcaggtaaactccgaataggagaaacttcaacgactattcctcttgagggaagtacactacaagctattggtagtggaagtgggtagaccttagcggataatgccgaaggataagatatagtctgtgcttacatgaaagtgtaagaagttcataagagaactgcataggtagtagcgaacttatgtgaacgacaacctcaaaaatgataaaagttaagacttacggttcttaaatatgttatttaaaattaaatataaaaccttctaaataattgttttaaataattacatttgttaatattatgataggtgattaataaattgttcaccacagcattatataatatattaaatatgataaaatcattaaaaagtgtatcaaaaaacaattaaagtgaggtaatagcagtggaaaaagcttataagtttagaatgtatccaaataaaaaacagcaagagttaattaacaaaacttttggatgttgtagatttgtatataataagtatcttgctaaaagaatagaagtttataaaaacgataaagaaacttttacttataaacagtgtagttctgatttgaccaatttaaaaaaagaattaaagtggcttaaagaacctgacaaattttcactacaaaacgccttaaaagatttagataatgcatataaaaaattctttaaagaaaaagcaggatttcctaaatttaaatcaaagaaaattaatagattttcatataaaactaactttacaaatggaaatatcgtgtattgtggtcaacatataaaactacctaaacttggtatggttaagataagggataaacaagtacctcaaggtagaatacttaatgctactatatctaaagaaccaagtggtagatattatgtatcattatgttgtactgatgtagatattgaagcatttgaaaatactaataatcagataggtttagatttaggaattaaagaattttgtatctcaagttgtggagaatttatagaaaatcctaagtatcttaagaagtcattaaacaaacttgctaaattacaaagagaattatcgagaaagacaatcggtagtttaaatagaaataaagcaagattaaaagctgcaagacttcaagaacatatagctaatcaaagaaatgattttctacaaaaactatctactaaattaataaaagagaatgatattatttgcatagaagatttacaagtaaagaatatgattaaaaatcgtaaactatctcgctcaatttcagatgtatcatggtcagagtttattcgtcaattagaatacaaggctaattggtatggtagacaaattgtaaaggtaggtaaattctttgcaagttcacaaatatgcaataaatgtgggtataaaaacgaggaagtgaagaacttaaatataagagaatggatttgtcctagttgtaatgaaactcacgatagagatataaatgcaagtataaatatattaaaagaaggattaagactaataacaattcaaaataaataacttatgtaagaaccgtaggaactacggggatagcctgtggagaattagtaagacatattttagtatgcaaaattctatgaagcaggaaccctgtgactttagtcatgggaggttcagattggaaatgtgttgccacaagattattatggattaatagtgattttaggtgttattcttggagttatgggggcattttacaactggtttactctatatgtgcagtctttatacaagaagattcctaaaattgctacctttggaaaactgttgattccatttataatggctggtattcttgggattgttatgcctgatgttctggggagtggacacaatttagttgaagaacttacaagtcatgaatatatttttggaatggttgttttgatttttgttatacgttttatattttcggctgttagttttgggtcaggtgcaccagggggaatattttttccattgcttgttttaggagcatttataggtggaatatttggtatggtaggtgttaaagtttttggaatgaatcccgattatgtaaataactttgtgcttttggctatggcaggatattttacagctattgtgcgtgcccctttgactggtatcatattaatttttgaaatgacaggttctgttagtcaaatgctttcactatcagtaatttcaattgtggcatatattgtggctacacttatgaagtctaaacctatttatgaaagtcttcttgagaggttacttgaaaaaaatggagaacctgtacataaagagaggggcgaaaagatactagaccagttctctgttatgtttggctctcctgttgcgaacaaggcaattcaggatgtacagtggcctgaaaattgtcttttggtagcaattcaaagaggtggagaagaaattattcctagaggtaagacaattcttagaccaagtgatgtaattgtgactatgacagatgagagagatagtggtgctgtgtatgataagatggaaaatttgtgtaaagaacatacgtcacatattttttagggataatgatgaatgtttaataatgatagaatatttaatgaagatttgattaaaaaattggtaatttgaaagagagttaaggaattaatagaaaatgaaaatgtgatatcttagatgtaaaagagtttgaagaaaataattgtatatatttgttaatgagattatatggactaatggtatatttatactgtgctaaaagttgcactattgtatgaggaatgggaataaagggtttgaaaaaataggtagaagatttttcagatattcttattgggatattttaattaatatattttaattgcgatattttgggaagaatagaatttatttataaatgaaaataattaaaaggggttaaggttgtattagccccttttgcttatagagtttggaaatggtatcttgatagcagttgttttatgcttattatattttattacatattttaaaattaaccttatcactcctaaatcattattctatcaacttttaaaacactttcaagacaatcacctattgaaaacaaagttaattaaaaacctacatatcagtttagtattcgtgtagatgattatataaatataaaagtataagaaaggtgagtatctgtggttagttcatttttaaatgatatctttagaacaattttagtaagttgtatttttatagttattttattagtctttagaataactttatttaagactttcagtaaaaaatttaattactatatatggcttattgtgattattaagctatcattaccatttatgaattatacttttatatttaatgagtcaaaatataatggtaatattaataagataagtttaggcaattttaatagtatttctattgtatatagtactgttttagtctctgtttggattgctattacgatattttatttagtttatactttattgaaatatattaagcttaaaaatatgataaatgatttgtcttatgatgttgaggatgataagataaaaaatctttatgaaaatttattaaaagagcttaagataaataaaaaaatacggcttaaatattcatatgaagttgaaagtccagtattttttaattcgtgtgtcattttaccaccatgtgattatacattaaaagagttaaactggatatttaggcatgagttgatgcattttaagagtaaagacctttacattaagtatttggtgatatttttaaaatgtgtttattggtttaatccttttgtgtatataatggagaagtttatagatttggattgtgaattttattgtgatgaaagagttttgaagaattgtacgatagaagagaagcaggattatgcattgacaataattagtgcaatgagaaaaggttcaaatagttcaaataaatttgtggctggattacataaggagtcagatattaaaaaaagagtgtttagtatgtttaatgaaaagtacagaaatggtattttgatagcagttattttatgtttattatcttctattacatattttgaaattgatttaattactactaaatcaatattttatccactttcaaaacaaacacctattgaaaatagaactaattcaaaacctacatatcagattaatgtttatatagataattaaaaaatacaaagtttaacaagagattaatataaataattttaataagtatctttcacatatgttaaatttactttaattatattaaagccaatgaattattctttagaagctccaatgccagtaaatacaggtaaagaaaaatcttttactacaattgtaaattaaaaaatattctaatatttaaagaaatgcaaaagtgtaagaagggtaaaaatctgttataatacattaaaaactaaatttagaaaaatttacataattagaaaaatgatttgataaaaaataaagttaaatattaactaagtaaatttgaaaaagaaaaaatataaagtacaaatttaaaaggaggtaactaatgaaaaagaagttggaagatatgactttagaggagttatggaacttgtttcctatatttttgactactcacaaagaatgttggaaaaattggtttaaagaagaacaatatagactaactggaatattgccaatgcaaaaaattgttagaataagtcatattggaagtacttctgtgagtacgatttatgccaagtccattgttgacatactgattgagataattcctgattataatatgaaagatattaaagatttgattgagtcgaatggatatatttgtatgtctgagagcagtagtaggctttcacttaataaagggtatacagtagatgggtttgaagaacgcgtttttcatttgcatataaggtatgtaggtgataatgatgagttgttttttagagattacttaattgaccacccagatgttgcaaaggagtatgaaaaacttaagttggacctttggaagaagtatgagcataatcgtgatgcttatacagatagtaaactagattttgttagggagtttactgaaaaggcaaaggtgttgtattctaatagatataattagaaataggtacaattagatatttatcttatatatcgtattatattttttaagaaagtaattaatagaaaaaggggttgtttcaaaatggagagataaatccctttttcattgttgaaatgataaaaatatatttgatttcatgtaaaaaagagtgcctcatcaactaaaaagtttattttgagacacacacatttttattaaggtaaataaaaatatcacatttgattaaattttaagttaatgaatatatgtgtaaatatttaattataagttattataattttacatagtataaaacaatctaatttgtattatataagataatctaattttagactaaaataatctaatataaagaaatagagaaaattcattctcagtataagagatatccaattttccattgtacttattaacaatttctctaatattctcaataccatatccgtgagaattactatcttttttatctgaaataaatagttcttgttttctattgataggatttaccttgttgtttgtcaataaatagctaaaatactccttctcacaacgtgcctttaataccacttttctatttgacaaatcaggaattttcaaagatgcttctatagcgttatctaaagaatttgaaaaaatagtacataaatctataggttctatacccaagtgattgtctatatctatattaaagtgcacatcaacaccattttcttccaaacttgtatgacgaagatttaaaattgagttaagagcttggtttttgcaaaattgtttgccactaagagtacctatacctatttttaactgattaaaatactttttagctccagcaatatcttcaatttctaaatacgattcaatcatttgaaagtgattattcatatcatgtcgcattttgcgtatttgaatttgttgattttctagtaagttatagtatttttcttttaggtgatttgcttgtttttctatcttcatctttacattttcaatcaatggctgtaaaagaagtatcacaccgatatttgccagaattgctgacaagatgattagataagtgccataaggtaagttgcctaagataatattcttattactacccatagggattaaattagtaggtggcagaataatagcaattaatattgataaaaatgaagatatacataccatatcaataaaaatccatattttatttgataagtattgttttatattgaccaatctattctttaggaaaatatgtattaaaaaccaaaataataatttaattagagcagaaattatctggactattgaaagtattaaaatatattcttttgagtgtataagttcctcatatatagggttgtttataaaaagaaaattaagcccaattataataggataaagtatcatgacaactgatattataggaattaatttgcttttgctacatattataagtagtataaaatatccgaatagtgtaaacaaaatatttacggggtcggaaagccatattatcatttgactaataatagagtagcccaaaatcaatatgattttgaaaatccaatgattcctaaagtctataaaataggaagtcaacttataaagaaaaaaggctatgaaaatattgattaatattagaataaaatttatgcttgtagagattaaagaataagtgtccatttaatatacctttctattaattaagattctggaaactaagttttaaaaaattaaatcttaaaaattaaaattctggaaattagatttcaaagaattgattttgaaaaataaaattctagaaattaagcttcaaaaaattgagttttgaaagattgaaattttaaaaattaagtttcaaaaaattaaatttgaaacaaaactctaaaaactaagcttcaaaaaattaaattttgaaagattgaaattctagaaactaagctttaaaaaattaagtttcaaaaaaactctaaaaactaagcttcaaaaaattaaattttgaaagattgaaattctagaaattaagcttcaaaaaattaaatttgaaaaaacaaaactctaaaaactgagctttaaaaaattaagtttcaaaaataaaattctagagattgaacttcaaaaattaaggttctaacatataccttgtaaattttcctacaacctcttgatattttttacggcttataggaattttttcattctgaactttggcataagtttgagttatactatctacatggtttagattgacaatatacctttgatgcgtacgtataaaattagagggaagaacagtttccatatcatttaattttccgtagtattctaatgttttatcaaaggtaactacagttaattttcttagctcgcttttaaagtagaggatatcttttgtattaattttacaaagattagttccaatatgaactgtaataaagttttctttccattgttctaatttttttagtgcttcttttaatactttacatattttttcagttttataaggttttaagatgtagttcaaagctcctacatcatacccatgaaatacatagtcagaaaaacctgtgacaaagatgattatagtatcttttgaatgttttcgtatagtttttgctatgtcaacgccattacttttttcaagttcaatatctaaaaaaataatatctatgtaataattttcgtgttctagattgtatactagactttctccatttgaatattcttttatttggtaggggtagccccacaaatccatttctcttgtaatgattttattcagcatgtttctttgttgtttttcatcatcacaaatacaaatcgaagtcaattttttatctcctttcaagttttatatttatatagttaagtatataatatattttgctacctagatatataaaatgaaataacaattatatccagatagcaaaataaaattttttatattagtatacttacacttaaaactattctattaaacttattctgaagtgctaatgattttcttattaaaaaatctaataacctttcttattataaaataccaatgcttttattattataaaaatgtaatgacttttcatattataaaaagcaaatgattatcttactataaaaatacaatgacttttaatactataaaaagcaaataattatcttactataaaaatgcaatgacttttaatactataaaaagcaaataattatcttactataaaaatacaatgacttttcatattataaaaagcaaataattatcttactataaaaatataatggattttcatattataaaaagcaaataattatcttactataaaaatacaatgacttttcatatcataaaaatctaataaccttttttaatttaaaatgctaatgcttttcttattataaaaagtaatgattttattactttaaaaatctaacaaccttccttattataaaataccaataatttttttgaatttcttataagttaatagatatataaggtacatataaactccacaaatccctataaaacctaagtttatcaaaagagcattgacctcactattgacgattctaccatcattatttaacataatcataaaattaaacagataaattaaaaaacttcctgcaataagagggtatgaaaatactttctttaattgatttctaatacagaactttatataatcattgtttgctcctaatcgatttaaatccataaagacctgcttgtgatttatagctatagtaacaccccttgtatatgcaatgattcctactgctgtaaaacatatgattgccacatatatgaataacattaagaagactgccatgttttttatcatatcttggctttgtaaaattttaaagttaggatagtatttccaattaagatacaactgattgttgtttgggtctagttttaaatgaccttcaccacttggatattcttcatccataaaatattttcttccagttgattcataacgtttttttacgtattcatcataaccactgaacatgcccatttccttagatgttctttttataatttctttctttaagtcattggcaaaagcataggtatctttatctacattaaatagtatagaattattgtaattttttatggataaatctttagtaaatgatttataatcctcatcattaaggacataggcgttcatacttctattttgaaaaaaagaaccattaaatattatttttccagcatatctaaaggggatttctttttctgtgactgggcttgatataaatttggtatatttataatcttgattttcatttcctttatttacaacagcaagatattcaccattttttatagttattggtttgtcaattagcttggaaaaatctttagaattaaagaacatatcataggagctttttttcatatataccctttcgatagttccatctttatgatatattgattctacaccatcaacaattaattctatagaaggaatttccatatagttttgaatttttatattgtgtttatctgctaattgttcaatatctttttttgatacctgtttatctctttgattgtaggtaaaagtataatctatagggttatttttaagagtatcatagatacctgcaaccatattaggaacatagaatacagcaaataatgctcctgcaatcaaaaatgaaataacacacatgttttttactgtttgtcttcccataaatctcatcatgctagttgatatgatgtttttatagtatttttctggatgttttcctcttttagcatgtacaactatgtatgtcataatcatatatattccaataagagagagtagataagtaaagctccatacagatggtagtctataatttaatttgtttatagttagtgaaggtacgatatatcctagaaaaatacctagtataataaaaattatacctaatataccataccagtcctttacatcctgtattggttcagatattctctggtcatttaatatatcaattatatttgtacgattaataaattttacagaaagtataaatatgcataatgtcacaaatacactaaatataaatccatatatgaatccttgagttccaaaatgatatgtcatttctctggtatcaataatcactaattgaaatattttccatataccaaaagatacaggaatacttaatataagacctaaaaaacagcatactattgaaattaacaatatctctgaaaatagaagtttttttaatttcttcttatctgttcctagagccatgaaaataccaatttccttgcttttaaattttaaaaagagggaagaagcgtatgtagtaaagacagcgcatcctaatatagcaactgagaatatcattgtagcctgttttctgctatctccaccagttggaagtatgttttgtattgttgggctaaaataaattagagcatatgaagttactaataccacagaaagtattatacaaaagaataaagttgtatagttcttccaattataggctcgaagtttgctgtataatttattaattgtcatcttgagcgcctcccatttcttttaaaacttctagtaattcatctaggaatttatgtcttgaatttgattttacaacttctttataaattattccatctttaagcacaataactcggtcgcagaagcttgctgcaaagctatcgtgtgtaaccatgagtatagtagcatctaattcttgctttgcttttaaaaatgattcaatgactgtacgacaagacttactatcaaggttaccagttggttcatctgctaatattaaatctgggttgttcatgagtgctcttgctactgctgtacgctgtttttctccaccagatatttcggcagggtatttttttctgatatgttcaataccaaatagctcgcatagattaattgcacggttttccatttgtaagacttgactacctttgataatttgtggaacacatatattttcaaagacactaagaccatcaaatagcatgaaatcttggaatacaaatcctagttgttggtttctaacttctgaaagttccttttcttttaaatttcttatattattatttccaagaattatttccccattatcaattgggataaaacatgaaatacaatttaaaagagtagtttttccacttcctgatgaacccatgattgcgacaaactctcctttgttgatttcaaaagaaatattttttaatacaggatatgttttattgcctgttttatatgatttacataattggtttactttaagcatatatatcatcctcactttcatttatcttgtaagtcaatgatagcatttgaaaggggaggagggatatgagcaatattgtaatagttggatgtttttttgtaatgtttgaaaatatattgtttggatagtgtgagaggttattattatagttaaattgattatattattggaggatttagagggttatttttaggtattaattgttgtgctaaagtaatatgatgtggaacattgaaggtgtagttagaaaaaaggtatatagtaaaagtaaaaaggttatagaataacgaatgttgtattgaaaaaaatgatgtaaataatgtatagtagggttaaaaagaaaaaaagaattatagagcagtaagattatttaatggaatgtattgtaaataatttgaaaggatttaggggttattaacacaatgtaattgagaaaatatattggagttttggaaataaataggtcgttaaaaacaattgaaatgtataataaaaaggttaaaaagtattattagtataggtatgatagataattttagaaagtggaagtattttagactatgctgaaaagtgattgatatgattttgagatattaaaatattactatattatagtaaagacgttaaaataataaaatgttgtaataataaaggtttgtagtataataaagaactgtaataaataagactttgcaatgtaatagaaatgctgtaataataaaagtctgtagtataataaagaactgtaataaataagagattgtaatataatagaaatgttgtaataataaaagtctgtagtataataaagaactgtaataaataagactttgcaatgtaatagaaatgttgcaataataaaggtctgtagtatagcaaagaactgtaataaataagagattgtaatagaaatgctgtaataataaaagtctgtagtataacaaagaactgtaataaataagactttataatataatagaaatgttgcaataacaaaacaccataataaataagagtttgcaatataatagaaatactgtaataacaaaacactgcaataaataagagattgtaatataataaaagtctgtaatataacaaaatcctataataaataagattttacaatataataaaaatcctataataaataggactctgtaatataataaaatgctgtaataacaaaacactataataaataagaccctgtaatataataaaaatactataatatagtaaaaatcatgcaataataaaaatctataataataaaccccagcataacaaagacattaatttcttactaaaaaggccaccacaattaacagtgaaaaagcaattgaaagtattgaaaaagtaaagtgagaattagagtcattattacgattattaagttttatccataaaccacatataattgtacacaacaataaaattgctgatattactcctataaatgtaaaaaacattaaaattcctcccccttatttaatgcaagtatttttagtcaatgagaatattttcaaacgttaccataaaataaaaaaatgtacataaaaaattaatatagtattattttgtaatatctaccaataataaatctaattgaaaatctattaaaccatttctctgttcaacattaagaatatcaataccactatacttgaaaaaagcattagaacgaagaaaaagcaactgaataaatgaagttatttgatacgcaatagttctgtattcagcttcagtttttttgttattctgattttcatagtgagccttaattaaaggtagtatctcaaatggataaacaatttcttcttgtatcaatatatagggtacagaaatctttataaattggctatgttcacctataaaatcaaaaaatgcaattagtatttcccttaattgctgtttaggtgctaaatttttagtatcatgtgtagccttatattcatccatatgacgctttaaaaattttttaatagaaatattaattaactcctctttagatttaaaataataattaatcatagctaaattgacatttgctttagctacaatttctctagccgtaatgcttgaaacatctctatgtgaagatagtaactggattgtggcattaattaattgttcctttgttgaatctgctttcataatttttccccttaaaagtttctccataaaaaaattaaacatgtttaatacacgtttagatactatcatgaaaattttgggatgtcaatgggtgattagtacttaagtatttaagtactaatcgattagacttttataagggggatttgaatttctgtaagataattttcaggatttatttcattatgctcacccttatgaccgatttgtctatttatacctgatatttgataatcactatttttatctaaccaataacagaacgattcatatgcaccagctatattttcatatggaccataaaccatagtacatgccatcatatcaatttcttctgtctcacgatatataaatccagatttgttctttccaatcttctttacaaccattccaacttcaatatctacaccattatctttgacttcttcatcatggtaaaaagctatattattgttgggttgacgtgatacttctatatgttcttctttaataaatttagataacttttcccagagtataccttcagattggtagtctgggactacctctctaagtgatatgattttataacttggaatctttttaaagacaacattgtaatgaatttcatctttatcacagtttatagcttctataaatttatcaattttatttattctttgttgttcgtgctttatttccttttgtatttcattcttttttctattcaattctttaattacaaattcatcattccaattatgtacgatatttgctatttctgcaacgctaaattttgaatctctcaataatacaattctttgtaatattgaaatctgttcaactgagtataatctatgacctgtatatttgtctatttctgcaggctttaaaataccaagttcatcataataacgcaacatacgaatagaaatttgtgttagttttgaaacctctcctattttaaacatgaaaatatgacctccttttcacttataattagtatatattttgtttttatatacttcaagcgattgtggaaatacaattattttccagatgttgcaataaattatagagagtaaattatatttaagtagtaatcgtatcaaatcatagattatcttaatttataattcatattaaaattaccagtctaactcaaattcaaaatcatccgactttatctgttcaatttcagaatttaccttctgtttaaatttattagaagaaatcatatatacaagaaatattaaaccaaatattatttgtacatattgagctattacacataatttaatagggtagtgtagaagtaattgaatgttgaaaaaatagtacatcatatgaactaacccagctgataaaatgcttctacttgtattgatatatacaaaattaattataaagtttaaaagtacaatgtttggtataaataaaaaagcatcaaatagggagtattgtgccaaattatatggtatttgattaggtgtaaaatacgaccctagataccagattccacaaacaagccctaaaataattgaagagcctataaatccaaatctaactaataatttgtcaatggcgtatcctctccatccagcttcttgactaagtatactcaatataaaacttgctaatagcatataagctattttagaaggtctaaacactgctatgtgtatccaatctatatcagaagtttttacattaaagtaatttccgattattaacgaagtaataaaagttaaagcaaaaaataatattgttaatagtatccattttattctaatttctttaaagcttaggtatctataaataaaatcttgttttgcactttgtggatagattgtagaaataaaaaatagacctacaatagctggtgatgtatatgcaagataaaaaatgatttctccaagtattgtatttgtaattccgagcaacgcaggtgtaagactgaatatccagttcaatactagcgtagatgtaaagaaatagattaagtgtttgtttgtattaaagggggtgttatatagttgcattttttcactatccttccgttttataatgaagttttaatttttattaattgtttatttatttttatatgtattaagttatcgtttgatgttagttattgcctataataatatcctattttttatattttgattaattatttttacactaaatataattaattagtatttaatattgaacatattatattattattaattattaaataggtcaataaatttgcaattagtgatattaataaattactttagatttttattaaatgtttagcttttctttaatattttttatataacgacgatttataataactttttcgttgttttttaaagtagcttgcatgcgattatgtgatattacttttatactttttatgtagtccatatttaaaatcatggatttagatattcgtgagaaggatgtattagctaataattttgataatttatatatttttaaatcaatttcaaatacatcatcttcataataagcaaatgttttatttccaactgtttcaaagtataaaatatcacagacattgagtttataaatctctcctgattttttaccttttatatcaagtaatggtgtactcaataatgaaattattttttcaatgttattatctagagcagaacattttatggttatttcaatatcatcacaattaataccttgttcgacatgtattttcattaatcatcacctcattttattactgtcattagaatagcattatatcttattgagtccaactagatgcgttctaaatttcaaattaagcatagtgaaattcaaaaataaaatagtgaaattcaaatttgaggtggtaaaattcaaaaaaatactatggatatttggataaattatccaaatatcctagtatttagcatagaatatgtctaattattttacaaatagacctattttatgacttacatatattgtcaaattacttcttaaatatcaaaatatttttggataatgtatcaatactgtttgataaagtatttaatttaccctcaattctaaccaacaagtacatggatagagctataggaaaaccaacattggttattaacagttgtaaactatcatccataaaattagccccctattctataactaagtcataaggagtggtatttgtttccacaaccttggcttcaacaacagaagctaggtcaaatcctccaaccgaaaaaatatttttagatactatcaaatccatgacagattttatattttcttcagttaaatcatcctttggattttctatagaaaaagaaacttgtttatcctttacatttttaaagctcatgactaattttttcttaatttccatataattacctccgatataataatttatattttaattgtttgcttgttaatattggtattttaattgtcaatattagtgttttgcttgttagtattaatatttcaattgtcaatattaatgttttacttgttagtattagtatttcaattgtcaatattagtgttttgcttgttagtattaatatttcaattgtcaatattagtgttttgcttgttagtattaatatttcaattgtcaatattagtgttttgcttgttagtattagtatttcaattgtcaatattagtgttttgcttgttagtattagtatttcaattgtcaatattagtgttttgtttgttagtatcagtgtttcaattgtcaatattagtgttttgtttgttagtatcagtgtttcaattgtcaatattagtattttaattgttgactctagttattgctgatatagaaaatatttaatttatttcaattaattagattaaagtagggtagcatttaaaatagctaacatgtttaagttgaaatacgtttaatatattaatttttcaaagcattaatatattaaagttataaccaaaattgaagttataatctgccaaatctatagcgtattaagtgcgttatataacttaatcttttatataaagagttaatttttttaatttgtaaagcagagtacgtttaaaagatactatttagataatgatgtactatctaattttaaaatatctacaatagggttctcttgaagacttgctattgcttctgcaacagcataaacatcttcatttaatgcctctgcttttacatttgcaaatgatttacttttaacaactgccttacccttatcatcaaaaccagcatccaattttagttttatactagataaattttttgttgaaacaacttccataaaattacctcctaaaaatttaatttcaaagatttgtcgactttctttgttagctataatactatcatctaagataatatcggagttaaacagtaatttctaaagattttttgtgtaaatttttataggaaaaattttacttttctgatgatgaaaaagtttacaagttatttttgaagatatgttcttagtgttttgaaatagtatttgtatatattcatgcttagttgagatagttttgtatggattttcatatgtgtagagttaaatgttaggtaccaaagtttatgttaaattaaatgttaaagcttatgttaaaaattttattaaatttaatctgtaaataaaaaagttaaaagtccaatattaacattttacttttaaaccattaaaatctttattaaagctaacaaagttataagttatgagaaattttattaaagttaatacaaaaattaattttaaagctaagaaattttttattagattcaataaaactaataaatatagtttagtcaataatgtattaaataaaaactttgttaagtctataaaaatatcttaaaggaggtgtaacttatgaagataaaagtggaggatataccagttcaatttcatgcaatggtagaaataatcggaattgataagttcatagaggttgccaagttgtatggaggaacaaatacttatatacctacgtataaggggctttttagatatgctagaaatagggatatagtaaaacaatttaatggagtcaaccataatgaattggctattagatataatatgtgtgtaagcaatattaagcgaatactcaatgaaaataatgtttaaacataatgaaaatagccttgttaaatgtaagagtaaagacaaagaagatgttttataaagtttttttagacaaattaactaaatttactacttattaatttaaatacattgtatattctataaaaaaatttgttaaatactggagatatattgagaatacaaagaaaatggtcgaaaatatttgttggctaaaaaatagataaaatgatacaattgcttgtataaaggggaaaaataaataaataaactatataaataaagaaatagcaattaatatgacataatatatttataaaattaagaatataaatagatattttaagggattagttgttaaattaggaaatattaaaaaaatatatatatttatatttaaactattttgttatttatataaaaatacttatctagttactagcaattattagtagaaatgggggaaatagagatgaataagggattttacaaattaaattcagtggtattgaactttgatattaagaatgatgttaacaagataagatttaatcattatataatgagaaaagaaaacatacaaagacttcaaggaactctgccaaacggacaattttatatgacagtgagaagagctgctacagatttacaactttctatttctactataagtaggcttgtaaaagagtttttggatttagggataataagattagtgtctaagggtgtaaaaggtaatcgttctgtatatagttacgtaagtatagagtttaatggaagtttatttgatgatagcaaatatatggaacttgactgtgtatgtaatgatgaatttattgataatagtggcatagagtttgattgtgatagcaaagataattcttttaatggagatataaatgtagaaactgtgcattgcattaatgagtatttctctgatgatgatgtagagcataattataacaatttccataataaagatactataaaggataaagccatttctaatattagcactatcaaaaaatatattgatgaatcttttgatacaaataaatcagaaaattctaacttacaacaggagtcaataaatttcaactttaatgatacatgcaatgaaatagataaaagaacgaataatagtatagaaaataatcaaaataaaaggcctatgagattgagtgacatcagtgttttaagtgataaaggtatgacaaataaaaagaattactttaatcataatcatggtatacaaaaaaggaataaatctgcaacaaagaaaaaagaatccttaaataaatttaataaaaaaaatatacagcaaagcattataaatatgctaaataaaaaatcaggtaagaattttaaaatcgattctccaataagcataaaacttatcaatgaaaggctaaaggagggctatgtcttagaagatttctataaagttattgaggtaaaagtggctaagtggaaaaataccataatggaaatgtatataagaccagaaaccttgtttagctataagtttgaatcctatgtaaatgaaaacatatctatgaaaagtcaaagtaatgttcatccatgtaaagaaggcaatagtaatgatagcagtaattatatacattctgattatacaacatatgatggcagtgtgcgtgagagaaaaaaatatgagaatgtaagatactggaatcctatatgtgaaatttaattagtttaagaatgtatttatgataaataagatattaatagagaatagtgagctatagcaaatgatatatcaatagttggtagtaagttatattaagcaagatattactatcaggtagtgaattatagtgaacgatatatcaataattggtagtaagttatatcaaataagatattactatcgagtaatgaattatagtgaacgatatattaataattggcagtaagttatatcaaataagatattactatcgagtaatgaattatagtgaacgatatattaataattggcagtaagttatatcaaataagatattactatcgagtaatgaattatagtgaacgatatattaataattggcagtaagttatattaagtaagatattactatcaggtagtgaattatattgaacgatatatcaataattggcagtaagttatatcaaataagatattactatcgagtaatgaattatattgaacaatgtattaataattggtagtaagttatatcaaataagatattgctattatgtagtaaattatatgtatcagaataaatagtatattaataatttgtagtatatcatgacgaataatatagtcataacaaatagtgagtcataacaaataatgtatttataattgataatgtatttaaaaatcaaaatataaaaacttataaggaaagagagattaatttatatgggtaaatcaaaagatgttgaaatagagaagtctattttaggcacaattcttttagacaataaattaagctataagctagatgaattaaatgaaaacatgtttatgaatgatatatgtcttgagatatttaaaattatgaaagaacttaaaaaagaaaacatagtgattgatgtggccactgtgaaatcaaagatagatagaaaatctctagcaataaaaacgagtgatgtgactaatctaattacttggggtcagaattttggtcttgatggtcatattaaaattttaaaagaaaatttagctagaagaagcataaatcaaaactgccaaaaccttttacacagcctaaaccttggagaaaatatcgatacttgtatttacaaatttgaaagtaatataaaggagattttggacaaggatacttatgaaaatgatgatgtaaatagtatagcagggaaggtgcttgattttttagaaaacaaaaaagatattggatttaaatttggtataaaattacttgatactactataggaggtctttttaaaggagagctaaccacaatagcagctaaatcgggggttgggaaaactgctttggcacttcaaataatgttaaattcatttaagcaaggtaaaaaaactttatttataagtagagaaatgaccagtgagcaagtatttatgagaaatatatgcagagtaactggtgtaagtacaaggaatatgaaatctaaagaaatagatgaaaatgattggaaacttattgtaaatgctataggtgatttaagcgaaaataacttaatttatattaatgataagatagatacaattagtgcaattagaaagaggataaggcaggtaaagccagatttattaatagtggattatgtgcaactccttacatctcagaaaagcatggataagagagaaagggaggtagctactttttcgagagaacttaaaaatatgactttagattttaatatacctgtaatccaattaagtcagttaaatgatgaaatgaaagattcaagaccttatggagatagacctatgagggatagcaaagccatctaccacgatagcaacaatgtggtttatatacatcaattaaaggggagtgattatgaagaagcagtgagagatattggagaaagtgaggaggcagttagagcatcagaatacaggggaattaagatggttgatttaatagttgcgaagtgtagagatggacagactaggcataagcatttttgttactttggggataagttacattttcaagaactaaattattaggtcaataaagtagtaataacaagcttattaaaagtcaggaaatagcaaatagattataaaatatgaggtgaaaatatgttggaattaacgaaaattatagaattacttgaagaacacaagatagaagtaagtattccaaaggagttacataagtatagtttattggaataccttgaattgtgtcaacaaagtgggggaacatatttttatattaaaacactggaaggggcattaaaagaggctagaaatgagcttatgattaaattgtttaatgggaaaaattatatggaattagcgaggatgtttgaaatgagtgttattaatgtcaggcatattgttagaaaaaaatagatatttttggagaatacaagtgtgatatacttctgaaatagaagttattatagttgaaataaaattgtggctaatttgtgtataagtttaagattatagaggagtataagtgtgattaacagcatgattttgtgaataaaattgatgatatatatgagttaaatgtgtgattaataaggtaaggttgtgtataagattatgagtatttaaaaggaggggctataattaatagtgtagagttgtatgtttgcttaagattatataataatttaatagattaaactatacgaataaggtaaaatcgtgtgtttagttaaagcttattataaaatcttgatatgcgattaatgatgtaatatgtgaataaagttaagattataatagatttaacctgtggctaatagaataaaattgtgaataaagttaagattataataggtttaacctgtgattaatagagtaagagtgtaaatagagataaacttcaatgtgggtttaacttgtggttaatagagtaaggtgtaactaaagataaacttcaatatgggtttaacttgtgattaatagagtaaggtgcaactaaagataaacttcaatatgagcttaacctatgattgatagagtaagaatgtaaatagagataaacttcaatatgggcttaacttgtggttaatagagtaagagtgtaaatagagataaacttcaatatgggtttaacttgtggttaatagagtaagaatgtaaatagagataaacttcaatatgagcttaacttgtgattaatagagtaagagtgtaaatagagataaacttcaatatgagtttaacttgtggttaatagagtaagagtgtaaatagagataaacttcaatatgagcttaacttgtgattaatagagtaagagtgtaaatagagataaacttcaatatgggcttaacttgtgattaatagagtaagagtgtaactaaagataaacttcaatatgagtttaacttgtggctaatagaataagattgtgaataaagttatagttttagatgggtattaacctgttactaatagaatatgattaggtgtaaaattatagagctgtataagaaaatattatagatatattaaatattagataataaatatttatatagatacacaaaagaaaaggcgatatgaagctaaacttaatgacttcatatcgttttttatttgaaactcctttgtatttagagtgtgatttttaatattgaggttttatgtgattaagtcacagataaaaagtaagtatcttgatataattcttatagattaataatatagggaggttattatgtctaataaaaaaaagaagtatgcaaatattttagcaaatgagtgcgttgcttgtggtagctgtataaaagcatgtccaagaagtgctatctcagttccatgtggcattagtgcaaaaattaatagagatttatgtgttggatgtgggatttgtgaaaagatatgtccagcatctgtaattgagattataacaatattaaaagaggaagaaggtaagtgtcatgaataataaaaaacattggtatgactatttatggattttttcttcaatatatttggtattgggatttgtaaatattattttcgcttggattgggctaatttgtttctttgttccactagctatttctattgttaagggaaataaagcttactgtaataagtattgtggaagagggcaactgtttaatttgcttggaaataaattgaagctgtcaagaaatagagatattcctaaatttattagaagtaagtggtttagatatgggtttttgacattttttatggtaatgtttgccaatatgcttttttcaacttatttagtgtttgaaggaagtagaaattttaaagaagtagtgactttgttgtggactataaaaatgccttggcaatgggcgtatcatggaactttagtttcaccttgggtggtacagtttgcatttggtttttatagtgttatgcttacatcaactgttcttggtttgattactatgatattgtttaaacctcgttcatggtgtgtttattgccctatgggtactatgactcagatgatatgtaaggcaaagagtaagtctgtataggaagagattttgtgaagatttaaggggtttaatgtttaaagctagagttgatttaagaaaataagaaagatataaatatctaaatatgaaatagattcaagatgagtaatagtttctattagctatgataggtatatgagtggagcataaatgaagtttgtataaagtaaactcatttatgcttcttttttacatgatacattactaattaaatagaaaaacaatgtaacaacttgtattttaagtacgtcagagaaatctgaagaaatgataaatgttatagaagattgtaaacttatgcttaaaacaagtaatagatatttaaaggaagcagattaaatttcaagaagtcttacgtgcttgttgaaacataaactggatttgttacagataaactaatttatacaatattttttaattaatatgttttcattactatatattatatgttaatacataaaaaaatggtggctgttttattaaaggtaggtcaatgacatttcttataaaaataaattctaactttaaattaacttaggagttctgtataataattatatgttgaaaatattatgaagttttgcttatacaataaataattgattttatttctggtaaaggtgatagaaaaataaatattcagattatatagtaaatttaactatatatattaaactataaaaaggagattttatatgatgaaacgagatatttactcagtacagttagattatatgttagcataatgtactgagtaaaataataatttgctaacaaatagaactgtactgctaaaaactttaggttttgttaacttgaaatgattaataatcacactaaatttaaacaaataaagaaacattttatctataaaattattttaagttaataaagtaaaataaataaggataggtgtacagttatgaaatatttaatagaaatagcaaaaaaagagaggttattagtttttatatatttagcactaggtataggaatagaacttttaaatagttttagtgctaattattatcagagcctaatagatagatttaataacagtactataaattttcacataatttttatctatggaactgtattagttactttatgtcttttaagatatattgatgaatatccaggtagaagactagaacatagtttttttttagatttgaaattaaaggctttagaaaaaatgagtaaaatagattacttagaatatcagatgttaggcactggaaaattaattcaaaaaattgaaaatggagctaatgctggcagaaatatattttttaattttttattagccgttgttagaaaaataattccatcaattttatttagtatggtttttatttatagaattgataaaaaagttatgtttaccatattaattggatattttatagtttttattattactaatttactaataaaagctctatatcaaatcaaagagcatatattaattaatgaagagaagatgaatcattttttagttcgtggatttgtagaaatggttgtatttcgggtaaacaaaagatttgagtatgaaatttgtcagtcaaaatttgcgaaaaaagaaattattgattctagggttaaaatgacactgattcatgaagctttcttcacgattttttcattaatagtgacgttcataaaaatgttaataatagtttatagttggaaaactaaaacaataagtataggttctataattgcattgataactttactagataatgcatatactcctatagctatttttaatgtattgtatattcaatttaaactagataaagcagcatataaacgctatacagatattttggaacttaataatgatggtcaactgttagcaggtaaagaagttaatttaatgtatggaaatattgaatttaatgagattagcttcttgtataataataagcgagagatatttaataaacttagtttaagtattaaaagtggagaaaaagtagctattgttggagagagtggttctggtaaatcaactttaattaaactattaattggattattaaagcccagcgaaggaactatatttatagatgattataatctacttgagatgaatctaaatagttactataattatgttacatatgtgtcacaggattcacctatatttgatggaactttacgtgagaatattgtatttggaaaaactataaaaagtaatgatattattgaagtcttagaaaaagtaggtttaaaaaatttatacttaaaattagaagctggtttagatactaaattaggtgaaaaaggaactacattatcaggtggagaaaagcagaggctagcattagcaaggctttggttttcagatgctaagataattatattagatgaagctacatcagctttagacaatattacagaggaaaaagttatgctaaatgttatggaatttttgaaagataaaacaactattatgattgctcacagatttaactcaattaagaatgttgaaaatataattgttcttaaagaggggagtataataggtagtggtagctttaaaaaactattagatggtaatttatattttagagaattatactatacaatgtcataattattatgtaagtataagaaaatatttttcttaatttaatattatttaaatattactggaatattattaaaaatttgagattccagtaatattttttagtattattcttaatatttacattaacatatattcttccatttttattaacttgtatttaaaatgtaatatttttatataaatatgaaaaatatcaagtatttaaattaaataaattcatatccattaattgagggatagatattaaaagattagaatttatgagttattagaaatattctatataaatagcatagaaaaatagttaaactaaattattaaaatataaaaatatacataaaaaataaatgtaaatatcaaataagatactatataaaaatagatataagtatcttttttattattgaaattatgaaaatatatttgatttcacacaaaaaagagtgcctcatgaactaaaaagttcattttgagacacacttttacagtgtcaaagaacgaagtttatccttatccaatacttttataccaccacgagataaagacacaataccttctctagcaaaatatttcaacattctcgatacaacttctctggcactacccatatacttagcaatttgctcatgagtcatatttatagtgctactgccatttttagctatctcatcaattaaaaaagatgccaaacgcttatcaaaactcataaaaagaatttgttgcatagcccacataacatcagaaaaacgttcggtagctaatttatatgaaaataactctgcatgaatattttctgtagataattttgcaaaaacagaggaattaatctgtataatatcgcagtccgtttcagcatctacatagacatcaaaagttattgtttttagaatacaggaagctgataaaatacatacatctccatcatcaagtcggaacagtgtaacctctcgaccttcatctgaaagtatgtatgtacgtattgttccagactttataatcaaaataccaatacagtcactatcaccacaatgtactggattcccttttttgtaatccgaggtatttgctgaagaaattaataattctttttgtaagtcagtaagtttatcccaaaaaggcaagctatgtgtaagtatatcaatttcattttgtgaaatcatacaatatctcctttcttaaattgttataatcccatgatacaagtgaatagataaattgacaagtagtttgttaagaggattatttagtcagatagtaatagtatgatttatgtagaaaaaatatgataatatatattcttgctattaatgagaaagtaatatgttttgatgatagtaggtttgtataactaatgcataccgtttatttttaaaagattaagttccttatgtaaccttatagacataaaaccagcaattatagcagccatcaaatcagctattggttgtgcatataagataccatttaacccatagaatacaggaataatcaaaattatagggataaaacagacgccttgtctacacatacctaaaaatccaccttcctttgcttttcctagtgctaggaataatgtagaatacactgtatagaatccaaatagcataaatgaaaacccatttgccctaagagctttactaccattttctattaatagaatgtcaccacttgtaaattgtgaaattatagattttgggaaaagcaccaatataagaccaagcactacacaaaatattgtagtccataatatggaagtttttattgctatatgtaatttatcgtagttcttcgaaccaaaattataaccagcaattggttggaaaccttttataaaaccaaatacaacaagactacctaaagatgttattcgtgttacagcacccattccagctatcacagaatcaccatactttgtagcctccatattagttaatgtaatggcaagactagtcaataattgaaatattaatgtaggtatgccaatttttaggatttctgaaaaaatttcttttgaaaaacagcattcgttaattctaaaactaaatatacttttcttgcttaaaatatatcctacataaacaagtgttgaagcaatctgtgagatagctgttgcaatagaagcaccccttacccccagaccaaaagtataaatgaatatcgggtctaaaatcatattaagcaaagcacctaataacatagcacacatagttgttttagcagctccttcacttgtgacaatattagtcatagtgacattgaatatattaaaaatagatgacacgacataaatgctagcataagatattgcataaggcataatactttttgtagctcctaacaattttaaaattggattgagaaaaatcataatcacaataataactaatgtacccactataatactactgtaaatagatgtacttaccacttttcctgctttttcattatcaccatggcctaaaagtctggcaatatatgaagcagctccatttccaaacaataatcctaatcccacaacaagctgacctaatggaaatgcaacggatatagctcccatttgacttgttccaagtccacccacaaagtatgcatcaaccaaattgtataatgcagttatcatcatacctatcatggtaggtaatcccatagataacaatgcttttgagattggggcagaccctaataattcaatttttttgttactttctttcatacttaacactcctcttctattgacattaagtctaaattataatactataaattatagtaagtatggaaaatagtactataatttatagtatttgtcaatagtaagaaaactaaaggagatgatttttatggctacaatagatttaattgtattgggaatagtaaagcaacaacccaagagtgcttatgatattcaaaaggcagtggaatacaggaatatatcacgttgggttaaaataagtacaccatcaatttataaaaaagtaattcaattagaacaaaagggatatattgaaagtaaaactgtgaagaatggaaaaatgccagaaaaagcagtttattcattaactgaattaggtgagacacattttttagatttaatgtttgatacatctagcaaaccaataaatattcttttagattttaatgctgttatagtaaatttaaatagccttacaccagaaaaacagaaattatgtctcaataatattgaagagaatgttcaagagttaaagaaaactattgaggaaaatataattataaagacagaagtaccagagacagcaaaagcagtgttggagcaacagttggtgctagcacaagcattggaaacctggataaattctttaaaagataatatggggaattagaattagagaagctaacttaataatcattaaacaaaaaccagcatatttaataatgagatattagaaaaaatgaaacaaatgatataaactgaaaagtatatttaaaataaagctcacttaattgagggagaatgttaaactttttaagagcaagagcaagagcaagagcaagagcaagagcaagagcaagagcaagagcaagagcaagagcaagagcaagagcaagagcaagagcaagagcaagagcaagagcaagagcaagagcaagagcaagagcaagagcaagagcaagagcaagagcaagagcaagagcaagagcaagagcaagagcaagagcaagagcaagagcaagagcaagagcaagagcaagcagtaaagtataaaattctattactataataaaagatagaactagaagtctttatgaaagtgggaaaagtatttatataaataaatttatatggtttatagtttaacagtaggaaatatcgtatgagtgagaatatcgtattttacataaagatttagcaatatgacacactgttgtcgtgttctgtaggatatgattaataaatcagatatgaaaggagagtgagtaatatgccagaattactaaaaaatatgtataatcgtgagtcactttatgaagttgcagtagctatccaatcagtttacaactcatttaaggtagacgagttcataaaatctacaatggatgagacatggaataacttagaattaaaagccagatgtcgaaagataagtatgagtttaggaatgtatttaccagaagactataaggaagctctttccattcttgaaaaatcagttacaggtttttattttgcttttttctttccagattttgttgaagtttatgggcaggacgaaataaattgggatttatctataagtgcattagaaagaaatactgagtattggtcttcagaatttgctgtaagagcatttatcatcaaggatgaagagcgtatgatggcacagatgcgtaaatggtctaagcataagagcgaacatgtacgaagacttgcaagtgaaggttgtcgtccccagttgccttggggacaagcaatatccaaatttaaaaaagaccctacacctgtactgcctatattggagcaacttaaaacagatacatcaacgtatgtacaaaagagtgttgctaataatctaaatgatatctcaaaaacacatccagatttagtcataagcattgcaaaggattggtacggtaaaaataaatctactaactggattgtaaagcatggttgtagaactctactaaaaaaaggcaatcgtgatgtattagccctttttggatatgatgatactacttctataaatcttcaggactttactttagaaacaacgtctatttctattggagaggatttaactttttcatttaatattttagcaaaaaaagcgacaaaaacaaggctcgagtacggaattgattatatgaaatctaatggaaaaaggaataggaagatatttaaaatatcggaggtttcattaaaagaaaatgagaaaaagtcatatatgaaaaaacattcatttgcagatgtaagtgtaaggagacattatccaggtatccactcgattactattattattaatggggtagaaaaaggcaaacttgattttgaattaggtgtataattttactaacagcataacctatatcagatactttgctaaacctatatcgtatactctaataaatctatattaggtagtttactacttgtttactgaatttaaatacaaagaaatacaggtgttaatccctgcccattaaaggaatatgagcataacacaaaagtagaacttatcaattctgttacgggtatagtagtaaatccatagaatcacaattagaagatgaagtgtaaaaaataagttagtgttgattttagttgctagtgatattgaatagttatacaatagccatataaattagaatttgtagaggagaaatgtaaatggatgtatatagtttttggaatgacactttggcacaagatgctgttaagataagaaaatattttcatgaagatgcttatattaattggcatgatacaaatgagcattttactttagaagaatttattattgcaaattgtgagtatcctgataaatggaatggtaaagtagaaagggtgctagaatttggaaatttagtaattacagtgacacatgtttatgcaataaataaaccactatcatttcatgtcgtttcatttatcagccttaaagatgataagattatttctattgatgaatattggggagaggatgatgatgtgccacagtggagattagataaacatattggaaagccaataaaatagtgtttgttctgttttataactgaaattttgataacatttgatattttgatttgtcattggtcaacatagtcgttagtgtaataatttaaaaaagtagaatttggagagtgagcactatggaagaaaaatacatcttatctgaccgaggtaaagtatattattggataaaagaaagtaatagtgtgtttgcaaagaacttaatttttttgccaggactaacagcaaatcatcatctttttgatttccagatacagtacttttcaaaaaatcataatgtattggtatgggacgctcctgctcatggaaaatcaagaccttacttagatttctcatattctaacttggtagaagaattgaaagtaattttagataaacaaaatatgaaaaaggttgtacttatagggcaatcggcagggggatttgtggcacagtcctttattgtaaaatatccaaatatggtagaaggattaatgatgattggaacttgtccatatggaactgactattatagtaagtcagatattttctggttaaaacagactgaatggatgttaaagttattcccagataaattgttgcgaaacataatatctaagatgtgtggagctacgtctgaaggcagaaggagtatgatgaaaatgttagaaggctacgaaaaaaaagaactgtgtcatctcatgtatctgggatttgctgggttcatgccagaaattcaagacttaaatatacattgtccagtttgtttggtggttggagataaagacaagacgggtaaagtgagaaaatataatgagcagtggcacaataagactgggtatccattgcacattataaaaaatgcttcacataatgtaaatgtcgataaacctagtgaactaaatcagattatggatatatttattaagcaattaaatatataaaaactacatactcattaggtaaattatgtagtatatgtgtttacatatggttatagaaataaatatgtaataaactacttaacacttaaaaagtggatttgtccagagcataatacaaagcatgatatataaatttttaagcgaaatacatcaaaagaagtattagaattagtggagataaaacagctattagagattataaataaatagttttaaaggtactacgaatatagaggaaggtaaatcatacgttattcaaggattataaatgagtagtttaaaagtactatcggataggtctctgcatatttaaaccttagtaaaggtagttaaagtagtagtttaaaaactaaaaaattatataaaggaattaggtataagaaaatgattgagagtataccagcaaaacaaattttacaaaaagtgaaatttgacaatacaagatggtttggaattgactataatatgaatctctatcgtggttgttctcatggatgtatatattgtgatagccgtagcacaatatacaacatagagaattttgacaaagttagatataaagaaaatgtgatagagattttaagtaaagaattgcgttcaaaaagaaaaaaaggggtagtaggcattggagctatgtctgacacatataatccttttgaaaagcaactttgtattacaaagcaagcactagatttgatttcggaaaatcattttggagtgtctattgatactaaaagtagtttggtggttagagatataccgattttgcagaaaattaaaaaaaataattctgctattgtaaagttgactataaccactgcaaatgatgaattatcaaagaaaatagaaccttatgtaaatccaagttctgcacgatttgacgcagtgaaagaacttaatgattctggaattttttgtggcatattattgactcctatgcttccatttttgactgataataaagatgaaatacgagcaattgtagaaaaagcacacaaggctaatgcaaagtttatttattgcatgtatggtgtaacaatgcgtagtggtcagagagagtttttttatgagcatttaagagatatatcaccaaaattagtacttaaatatcagaaaacatatggtttaaactatgtatgtactatacaaaataaagattcttgtgagaagttgttaagagaagaatgtgcacgttatggtattttgacagatatgaaagagattataaaagcgtacaagaggtcggagtcatatattcaaataaaatttttttaagataggctttggatgagatataatagtggtgattgatgtgttgatattatagttgattgttagagaggatattatagatgaatattaatattgatattctaggtaattgctagaactaatattatagatgaatattagtattgatattctaggtaattgctagagttagtattatagatgaatattagtattgatattctaggtaactgctagagctaatattatagatgaatattagtattgatattctaggtaattgctagagctgatattatagatgaatattagtattgatattctaggtaattgctagagctgatattataatttattattaatattaatattctagggaattatcactatattttaaaaagtaaaaatatatatcaaaatgaactaaataagtactgtaagaagtttgttaaattaaggtttgaataaagtgagggtggagaacttatgatagaaataaaaactatagaaataaataaaaaaagtcaaattgaccttttaatgttagccgacccatgtgaagaaatgattgataaatatctcaataaaggaactatgtacgcattgtatgataataaagaacttacttgtatagcagttgtaaatgaaatttccaaagaaatatgtgaattaaaaaacattgctacatatgagcattttcaaaatatgggttatgcctcaaagatgatttatcatcttttagatgtttatagtaaaaaatattcatcaatggttgttggtacatctgaaagcggagttcctttttatgagaagtttggatttgtttattcacataaaattaaaaacttttttgtagataattatccagaaccaatctttgaaggagaattacaatgtgttgacatgttgtatctatcatataacttttagataggataatatttttaggtagatataattaattaattcatataattatcggaattataatttataaattatgtataataagagtataatttatttagaagctgttatattgtattatattcaaataagatatataataatttgtttattttgaattttggaggattaattatggattcaaataataatactataaaatcaactgttaaaaagggtatttcttttggttcttgtttagcaatgattatttcttatactgcatggaaatctattccatgggctatttttcatggcttaatgagttggatatatgtactttattattgggttaagtatgcatagattaaattaataaataagtatgtaatattgtaaagtttaagaaacaaaatgtaagggagtgtctcgaagtgaactttttagtttataaggcactcttttttgtattaaataaaatatattttcattacttaaacaatgaaaaagatgagtatctctattttaatacatacccttatattcattcatttatcaacaatagttttaaaaagaaagctatctaaaatctattgtaatctaagtgcttctctttaaagtcttaactttagtaatgatatataagtttataaggttcttatttcaataatgcaaattttacttagaagttcagactttggtatgaagaaatgggtaataataaaaaagaggtgttgatatgaaagaaaaattagaagaaaaatctaagattattaaaacatcaaaagagtataaacgaactataattgaagaaaaggacagagaatgaaccaaaaaattaaatgacatacttagtagaggtgatttttctaatgaaaaattagataaaatcaaggatttaattccaaaagaaatattgactagtgaaaatgttggagaagttgtaactgaagatgggtatgctaagcctgagtatgatgaggtatttaaatcattgtttactttaaataatgattacgatttacttgcaaattttataaatgatatcctcaaagatgctccatatgccaataggaatatcaaaccgttcactcatataaaaagaataattaaggctgaaaccgacccaacaattaattacattggtgagaaaagacctagactttatattttggctgaagatgaagaaagtaatcatataaatattgagatgcaaagagctcttgaagatgattatttggaaagagctgaatattatcttagtcgtgtacatggtagaaagttagaagaaggtaaagagtataaagaaattggaaaaactgttggaatacatatactaaatcatgtaaaatataatcacatagaagattatgtaaattgcctgagattaacaatggacgggcatccaaatatttattctagtaaaactgcattatattttatagaacttccaaaaattcgtaaatccagttgtatagcaaacagagttctaatatggggtaaacttattgataatccttctcatattgatattagaatactatctaaaacagattatgttattaaaagagcacttgatagattaaaagaattaggcagtaatgaggactatttattaaatttaaagagaggtgcgtatattatgaataaaagtagaaattttaaagaagaaatttttcaagaaggtgttgaaaaagggaaaagagaagagaaatttaatatcatcataaaattaaaaaataaaggatataatttgagtgaaatatgtgatattatagatgatttgaataaatcagaggttgaaaaaatctataatcaaaactaatactataattgagatggcactagataaatataaagcttcctcttttaaatttaaattaatataaaaccttgttatttaactatagtagatacaaagagatatataagctaaggagatgattcaaaataaaagtttgaactatctccttcttatagaaaaacaaaggggttgatttatatatgaaattttatactatacagactttagaattttggaacaacaataaaaacaataaatatctatcaaatgattattcttttatattagaagactttgatattccatacaaatggatgtatagtcaaatgacaaatagaatatatgaatttgatgatagtatgatatgggtttggacgaagagacctgatttaagatgtagtggttatttagaaaaaggaaaaaaaggtgttttacttgaaatagaaataagtgaagacaatgtgttattatcagaatttgatttatggcatttacctttaatggatattactgtagagctttatgaagatgaacaaattgaaaagaaggtaagttgggaaagaatatttgacttagaactgtgttcaaaattaaatgaagttaatatagaagatttgacattgcaaggagtgacatctaaagtgcctctatctaatgtaaaattaataaaagaatttgttgcaaaataatatttttattgaaatttattcaaaaaagttatatatttataacaagaggtgttataaatacataactttttaagggggattttatatgtctaaacaacaaactggtattaaatcaacacttatttcagaaatattgggaatttcttattgtattggagctacattagtaaataagtatttttttaaaggaagtagtattgaatatcttcctataattatttgggtattagctatgggagctcagtgggtctataataaaaagtatgatgatttaattgatgaggcatcaaaatgtatactatcaagagttaatgatattgcaataaaagtattgtttttttctgtagctatagtatctatatttcttgtaactttggacataaatgtgtcaaatttaaatataggaatgtctttattagtcattttgtttattcaatccttgttgaagttaattctatttatatattttgacagaaaggggatatacaattaggtgtcagtattactaaagacaaaaattaaatcctatagagaaaagaatcttatgacacaaggtgaacttgcaaagtcagtaggagtaagacgtgaaactattgtacatttagaaaatggtcgctacaatccttctttaaaactggcaatggatattgctaaggtatttgatacaactgtagaagagttgtttgaatttattgaagaaaataatatttaaatttcatgtattacttatgcattagagaatgaattaatagataaaaaattcaagtttatgtattagagaatgaattaattataggtaaaaaaccaagcttatagattagagaataaatgacttatagatgaaaaaccaagctcatagattaaagaatgaatgatttatagatgaaaaagaaagcttatagattagagaatgaattaattataggtaaaaaacaagctaatagattaaaaaatgaatgatttatagattaagaagtaagcttatagattagagaataaatgacttataaataaaaagaaagcttatagattagagaatgaattaattataggtaaaaaacaagcttatagattagagaataaatgacttataaataaaaaccaagcttatagattagagaatgaattaattataaataaaaaccaagcttatagataagaagtccatgcttataagccagaaaatgaatactttaatagattaaaaaatacatatttgtgaattatagaatgaataactccataaactagaaaatttataataatatctatatgaaaattagaattattttatcacaaaaaaattaagttaaataaatatgaaattacttccaaatatacttccaaaaacatgtaatcgcatatataatataattataaaaataataaatatttttatagtagtagttaattattaataaggaggggtcaaaatgcctagcatgattatggaagttgtaggagtactatttatagctattggattaatcttgacattcattgaaataaaaggaaatttcccttctttttatggttttggtcaaaattctatagggaaaaatgctgtaggtattatagcagcaggaattgctttaattttctttagaaatggcatagatagcatagattctatagctacttatggtgtatttttagcaatagaacttgttgtaatagttgcatatttcttaataagaaaaaaatttactaaagaagataaacatttaagaactaattaactaaattatctactataaaattggaaaattaaaaacaaataaaagtttgtttttaattatttaaaatcccaatttgattatttttaaagaaactatattctgtataaaactagaatgtggtttcttttttatgtataaaatattttttagcaaaagttaaaaggtgttttataatataaaatagttaattgtagatgttaataaaagaaaattatgtatatttcagataaagataagagagtatactatattttaattattttttcaataaaacttattgaaaagaactttaacttagaagagtatcaccaaattgcagatacaatatcataagcagttatttattgacaaccctttttaataaatatatcatttgaagtatactgacgaaaaggagttgaataataatggacatcttattggttgaagatgataagaatattcgagaaatggtatacgattttctgattagtgagaattattttgttaaaactgccgttgacggaaatacagctattgaaatatttaaaaattattcatttgatattattttactggacttgatgttaccaaagtctagtggttttgaagtattaaaatatatacgaagtgtgagtgttgttcctgttattattactactgcgaaagatagtgacacagataaaatgctagggcttaatcttggtgcagatgattatattacaaagcctttttcaatcgtagaattgcttgcaagaattaaagctaatattagacgtgcaacggtgtatagcagttcaagaaactctgaagatatggttattcagtataaagatttgattataaacatatcaaaatatgtagtttcaaagaatggaattgacttaaacttaacacatacagaatttgaaattgttaaattactagcgactaatcaaggacgtgctttttcaaaggaacaattatacaacactatttggaaagaaccttattatggaaatgaaaatgtgctaaatactcatattaacaggttaagaaataaattgtctgatggtatagaaaaaaataattatattaaaactctttggggaattggctacaaaatggaggaagaataatggagttatttttagttgtaatttcgattgtactatttgctttctacttaaaagaacgaaataagtcaaagaaaatggaaagtgattataagtatatcaattcaagacttcgtgatataacaaatgatgatgaaattaattatattttagtaccatctgatatttcgattgtaaaagaaacagcagtagatataaataaacttcttgaaaagttttacagtaggcaaattaattataatagaagtgaaaaagcgatattgcaaatatttacaaacatatcacacgatttacgaactcccatcacagtattaaagggttatattgaaatgctatatcttcaaagtcaaaaagaagaattatcttcttcaatgagagcaactttggaaaaaatgcaaacaaattcaaatgagcttgttaattcaataaataacctgtttaatatggcaaaaatccaatctggagatatgatattaaatcttcaaaaatccaatctaacacaattatgtcatgagattattttagagttttatgatttactagataaagaaaactttaatgttgaagttaatattgaagatagacctatatatgcaaatgttgacacagaagcattacaacgtatactcaaaaatttaattgataatgctataaaatatggttcagatggtagatttttagggatttcactatatgaaaaggaaaaacatgtttttatagatattgaggataaaggttcaggtatttctgaaactgaaaaagagcatattttcacaagagcttatactgctgacagaaaaaaaggcaatggtttaggtttggctatttctcaagggcttgcaaactctatgggaggttcaatttatgtaaatagtagacctaatgtaaaaacagtttttacggtaaaattgaaaagttagaaaaaagttagatttaaaagagagaaaagataattttattttgtatactgtttttagaaaggagggagtatgatgaactatatcatagagacccatcaattaaagaaaatatataaagataaagctgttgttaatgatgttaatattcatgtgaaaaagggagaaatttatggatttgttggaccaaatggagcaggtaaaagtacagtaatgaaaatgttgctaaatctcgttaagccaaattctggagaaatagttatgttcagtaagaaagtggcagaaactgattttgaaatattaaaaaagattggtactattattgaaaatccttatttctatgagaatttgactgctaaacagaatcttgatttacactgtgaatatatgggttattataacaaagaacatatatcagaggtattggaatgtgtcggattgtcaaagcaatcaaacaagaaagtttcaaaatattctttagggatgaaacaacgtcttgcaatagctagagcaattcttactaaaccagaattattgattcttgatgaacctataaatgcactcgacccagaggggataagagaaatgcgagaattattccgtaagttaaatacagattatggaataactatatttatttctagtcatattctttcagaggtagaacaaattgcggacactattggaattattcaagatggtaaacttattaaagaaatttctatgtcagatatacacaaatatcaaacagattatgttgaagtagatgtagataatgtggaacttgctggatacttgttagaaaaagaatttggaataaaagactttaaaattacttcggaaagttgtattgaaatatatgatttacgaaaagatgtaaaagaaatatccaaaatatttatcaaaaatcaaattggtataaatagcattggacgtaaacaaagttctttagaagattacttcttccaaactacaggtacaggaggtatagaaacactatgatacatttaatgaaactagaattaaaaaaagttgggctaaaaagatattttttattttcaatactggggattttgttatgtatgttttttgtctttactggattgaatgataaatctacttcaatatatgattatgatgttacatttaggacaatcagtttagttttctgtttttactatattatattatttgctgtgttgaatgtggcatatataataaatgaatatacaaataaaacaatcttgattttattctcttatccacttgaccgtaaaaaacttattttatcaaagttacttttgattacgactcttatgatatcatcaatgatagttggatatatctgttgttttacattcgttgttgtgttggataagtattttaatttagttattggagattttcatatttcaattttatcttattggataccaggagcaattaaaagtattattgtattttgctcattaggtatatggacattcgttgttggaatgataagaaaatcaatacctgttacccttgtcagttcaattatttttatcaatttaagacaatttattttagctggtacaaatacaactcaagacagtctgatttctgtttttattatagttggaataactgtgattggtatatattatatactaaatcataaagttactgaaattgactagatactgtggataggaaggtagttattaattgtatcttcttgggataataatgatttgctattatatcagctattattaatattattagagttttaataatattaataatagctatatattttttcttcttatttataaatttaatgatttatagtcataaaatgaactctaagaagagataaaaatgcgttttatatgtttttagattaatatgaaatatcacaatgaaatgttgtacaaagtgatatataataattatatgaactataaaattgactaaacttattgactaataaattagatgaaaagttgagacttactgaaaataaatacaatgaaatatatactacaagtattaaattaaatctgaactttacatactattagaataagtattataagattataatgatttaaaaatattaaaataattgaggtgataacatgaacaattcctttttagataaattgattgagacaaaagaacttaaaaattcactttataatgtgttaaaacacaattttctttatcattctaataagatagagggcagtacttttactactgaagcattagcacttttactcgataagaatgttgttacaggaagacatactttagatgatgtacaagaaactgttaattctagttatgtatttgatacagtaattgactcactgaaagagaaaataacacataatttcttaaggaatctacattcaagtttaatcttcaatacaaccctacattccagagggatggctggtatatataaaactatacccaatatgatactaggaactgatgtaagcatagcacaaccatttgaagttgagccaaagcttgatgaattaattgaatggtactatagtcagagtgaagtgtctattaaagttatagctgaatttcattatagatttgaattgatacatccatttcaagatggtaatggtcgcataggtagatttgttatgctaaaacagatgttagaaaataatcttcctataaaaattgtatcttgggatagtgaggacttgtatagaaactccttaaattcttgtagtttaggtaattatgtccctttaattgaatatttatcaagtttagaagattttagagaagtatataaaatgttatggaaataattgtttgtagcaaaaaaagtttttatataaatatatttttaactatgctatttaacgttgatttcttagttattcttagcttggactatacccactattttaactatataaaatagtggatatagtttaactatctctttataactatttttatgtatcttagttgtttcttaatattgggacagttcataaaactaaaagtgatttttaattttatcatttataatttaccattacatcagaaaaatgcttatcattagaattttcataaaaggtacctattttcttcaattaactaaatcaattctattagtcttaatctttcgtatttcaaattgataatacaagaaaataaaaaataaaaaattttaaattttttatttattgcgaaaaaaataaaaaggtgctatactttttgtaacatattattcaaattattaagagatagtaaatatttatagtttaatttgtagtacactagcatgatttgcagaacaatgaattaatctatagtataatagtttaatttgaagtacaacgatttaatctatagtacactagcatgatttgaagtataacgatttaatctatagtacaataacttgatttgcaatacaataatttaatctatagtataatagcatgatttgaagtataacgatttaatctatagtacaataacttgatttgaagtacaacgatttaatctatagtacaataacttgatttgcaatacaatgatttaatctatagtataatagcatgatttacagtacaataatttaaattgtagtacaaaagtactatcaaataagaatttctactttaaaaatattactaaaagtaattaaaatccaataattcaatataatatggcaaaagaatagaaataaggtgagagtagtgaaagtaaagtcaaatttagatgaaattttatatcataagattattgaaagtcttattcgtggtgaatactctgtaggtcaaaaaatattactaaatgacctttgtgaaaaatttgaagtaagcagaacaccagttgtacaagcagtaaaaatgctaaataaagatggagtgcttactattatgacaaatggtaaagtgtacgtaccagagtatgaatatgatatggtaaaacaagtttgtgaaacgagaacactgattgaaacatatgctttagaaaaaatgatgcaagaagaggaagaggtttttcaacaaaagctagatgtaataaaaagatactctgataaatgcgaggagtactatcgtcaagaaaaatctgtagaacttgcactagcagatttggaattacataaagccattgtagaaggggcaaataatgagattttaaatgatgtatatgttggtatacaaggaagatttatagtagtgaactatttaattcgaccattaaaaaatcgtaattatgaaggaacagtacaagaccattttgaaatattaaaattcattgaagacagagatacaaaaaaagcagtagataaactaagaaatcatattcaaggaactattaaaagattctgtgaagatgaataataagttttgaagttactatatacttatctattaagttgctaaatgtagtctaagtataatctaattatagtttaaacataatctaaatataatctaaatatagtgtaaataagtctaagtatgaattaaatatagattaagtatgaattaagcatggattaaatatactttaaattacaaatattacaaggaagccagaaggcttcctaaaaaaataacctttataaaattttttattttaaatttaaaattttttattttaaatttaaaataaaaaatgaaagaggtggtagagagtttgaaaaaaattactaaagaaaggatagaaaatactatgaaaaagctatttacgagcgaaacatttttggaatatcaatttataagtgattgccaaatatcaccagatggaggatatacagcatttattgtaaaaaaagctgatatcaaagagaatggttacacaagccaagtttatatattaaacaataaaactggcgaattaaaacaaataacgtctataaactctgttggagcatatgtctgggaagatgaaaatactatcttgttccctgctttgcgaaatgaaaaagtaaaagaagctgtcaaaaacggtaagcaatgcatgagttactatgctttatctttaaatggtggagaagcagaagaactttttagactccctatcaaaggtggtaaattgaatcctataggaaaaggtttgtatgcagttattgattcttatgacaatgaccgacctattgtagagggattgccagaagaagaacaacagaaaaaaataaatgcttataacaaaagacattatgaacatttcaaagaaattccttatgctgtcaatggggagggatatattagcagaaaaagaaaacgcctatatatatacgacagtaatataaataagttgaaggcaattacagcacctatgtttaatgttgtaggtatgaaaataagtgatggaaaaatcttatatatagggcaagagtttaaagatgtaaaaggtttgaaaaatggggtctatgtatttgatacaaacacaaacacaaatatctgtatattagaaaaagataagtatattataaaaggttttgaattatatcaaaatcaagtgatactaaacctaactgatgctttatcttatggaaatggagaaaatggagatttttatactattgatattgatacgaaagaaatgaaacttctttcagggcatcaacatcattgtattggaaatacagtaacatctgatgttaaaatgggtgctggtcagacaacaaaggtagatggagaatatatttattacacttctacagtagatatggactgcattattgaaagaatacatattccaacaggaaaacaggaaaaagtaacacagacaggttcagttgattttatagatgtaaaagatggcaatattgtatgtgtgggttgtttaggaaatggattaccagaagtttatacagtagagaatggaacattgtgtaagaaaacacatttaaatgaccatattttagaggaatataaaatttctgtgccagaatacatagagtcaaaaggaagttctaaatgggaaatacaaggatacgtatataaaccagtagattatgaggtggggaaaaaatatccagctgtattggcgattcatggaggaccaagattgacatatggaccatattttatgcatgagatacaggtatttacaagtgcaggttactttgtattcttctgtaacccaagggggtctgaaggtcgtggcaatgcttttgcagatattaggaaacagtttggagatattgattatatagattttatggaatttacagatactgtacttgaaaaatatacagacattgataaaacaaaattggctgttgaaggtggaagttatggtggatttatgacgaattggataattggtcatacaaaccgttttgctgttgcttgtgctcagcgttctattgcaaactggagtagcatggagggtacaacagacattggttattatttctgcaaaggacaaacaggtgcttctcatatggaaaaccacgagcttcaatggaaacagtcacctcttgcttatgctgataaatgtgttacaccgactttatttttacatggtgaaaaagactatagatgctatatgcaagaagcattccagatgttttcagcattgaaaattcatgggtgtcctacaaaactttgtctatttgaaggggaaaaccatgaactgtctcgttctggtagaccaaaacaaaagctacaaagattagttgaaatgctagattggttttctgtgtacataaaaaaagataacataggacagtagaaaggagaatataaaaatggaaaaaataaagattgaaagttcagatatttttgaatatatattccctcatgatatttcttgttcacctgatggaaagcatattgcttatattatatcaaatatcaacgaggaaaaagactgctatgaacatgacttatatgtgatggacatcaaaacagaaaaacaaatacatatgactcaaacaaaagatgtaacatcatttagttggatttctaatacagaactactttttacatctaaaagaaataagccaaaagcaggtacaacagatttttacactatttctatagaaggaggagaagcaaaagaagcattttctattccaaaagcttgtagcgtacctgtatcacttggaaataaattgtggttattgacaacaaaaaatccaacggattctaaaaaatcagaaccagatagggcagtagagggtgtagattattggacatttacagataaaccttttataagagatagagaaaatttttctcaaagaagacgtgtaacattagaattatatcaagaaggtgaaaatataacaaaagccattacaccaaaattttgtgaagtagcaggtatagacgtttcttctgataaaaacagaattttatatactggtcagatttatgaagattgtgcaactcctttttctggactttgggagtatcatatagacagtggtgaaaccaaagaacttgtaccacaaggaaagtaccaaataagtttggcaaaatatattggcaaagataaagtaatgttgcaagcttcaacattagaacgttctatcacacagaatcatgatatttttatacttgatttgagtactagtgaaataaatatgattgctagtccagatggtatgtatgctacattactggatgtagatgcagtatatggtggtggacgtagtaataaagttataggagataaatttattggtgcaagaatttgcagaactatgacagaatttaatgagtttgatacaaagacaggtaatatacgtatcatcacaaaagtagatgcttttacatcttttgatatttacgacaacaccatgtacacagtaatgttgaaagattatgagttagcagaaatatatagcattgatatgactacaggtacaatgaaaaaaatgactgctttttctaaaccatatttagatactcataaggtttcattacctgaaaaattgacgtttgtagcaaaaaataaagaagaagttgatggttttgttataccacctatagatgctaaagaaggcgaaaaatatcctgctgtattgttcattcatggtggacctaaatgggcatatggctatatgtttacacacttgaagcagtgtgtaacatcaaagggaatgtatgtgatttattgtaaccctcatggtggtgacggttatggtgaaaaattcttagaaatggtagaaagatgggggtatgttgactatgagcatcttatggaatttgtagatacttgtattgaaaaatatcctgggattgatgcagaccgcttaggggttgcagggggaagttacggtggttatatgacaaactggataattggccatacagaccgtttcaaagcagcagtttctcaaagaggtattagtaacttgattacagcttctttaattattgactttggggatagaattatgaagcagacttgtggagataagacgccttggaatcatgaggaggttctttggaatcattcacctattaaatatgtgaaaaatgttaagacaccaacattgttcttacatagtgatagggattatagatgttttatgggggatactttccaaatgtttacagcattaaaacagcttggtgtagatacagaaatgtatttgttccatggagatacacatggattgtctagaaatggaagaccatctaatagaattgcacgagcaaatgctattgtagattggtttgaaagatatttataataagggggttattctatgagtgatatgttattatggtttagtgtcgtattagttttatttgctattggggatttaattgcaagcaaaacaaaagcaaaagtatcagctgtatttgttacactacttttatttttgattctatttgtcacaaaagcaataccagctgatattattgaaaaagcaggtatgaccgcagcagctagttggagtgttccaatgattatgtttagtatgggaacaatgttgaatgttaaacaatttatagacgaatggagaacagtattgacagcatggcttggaattgtagcagttatagtctgtgtctcattatgtattcctttgtttggaaaatcaacagtattgacaagcataccagttataaatggagctttacctgctactactattatgacacaagcagcactagaaaaaggactgacacttgcagcagctacagcaacagttgtatttgcaattcagaagtttattggtacaccaatagcttcaagagcagcgttacaagaggcaaaccgtcttttagtagaatatcatgaagcaaaatcaaaaggcattgatttagcaaatgttgatactgataagaaagaagcagagaatacaggcacaaaagtaaaacaagctttctgtgaaaaatacgataaatattattctacaaatgtttgtatattttttatagcactattctcttatctagggtatgaactttcagagattattcatgtaaattattctattgtatgtcttgttgttggtgttattgtaacacgtattggtattgtaccaaaagacattttggaaaaaggaaaaatcaagggatttattaacatggttgtgtttgcagctgttattccttctttagcaaaagtttctttgacagatttaattagtctttttgtaccaattgtgggtatgtttgcagcttctatcattggtatattccttatgatgaaggtgttaccaggttggaaaattatcggttctaaacctcttgcttttggagtagggttttgtcagatgttgggattcccaactacatatttaatttcaaatgaagtgtgtaatgctgttggagaaacggaagaagaaagagcatatttgatgtctaagattatgcctaagctggtagttggtggtatggcttgtatgatttctattgtagtagctggtcttatggtaccaatgttgtagataggtttcatagttaaaaagtggtgttaatttataggagaagctaaaaagtagtattaatttataaaataattttatattagttaatttgttataagaatattttctttttatgattataattttgattttataagagagcagattttttatttgctatgctaatagttataatttgtttttatttgctaaaatgcaactttaatttgatttatgtataatatagggtatttaataatatttttgaagaatttttataaaaaattaaaaagaggagaaaaaagggagtgccacaaagtgaactttttagttctaaggcactcttttttgtacgaaatcgaatatattttcaacgttttaaaagtgagaaagagacttatctctagtttgggatagccaaatttaattattaaaattattttttgttttatttatcaaagagtattcgtgttttagaagttagtattttttattttatatatccaaggttttccgtttctaatgttttcttttttaaaataattagggtattcaattatagtaaaaggtggatggtattttggaatgatattatttaaagcacagtattgaatgttgaaatcctcacattttagagtattatcttttgtaatcaaaaaaatcttctatacttatagcaaggttacttctgcaaatattccatgcatcataatatccaaatttaaatttttttaatatagagtttacctctagtctacactcttgaataactctttcctctatccaaattcttataaactcatcccatttattactatctatttattactatctaaattttttagtatgtttgtaattggaaatggatttattcctttatgttttttataaatagtttataacttaatttattattaaacaaatcattcatacagaattactttttcttttagatattcaattcttacttttaataaatatttaatacattctatcttatgtggttttaaaaagtgtttatggctatcaataatctctaatatttcattcatatttattttgtcatagtaatattttacatcttttatattgacaaaaaagtgctctaagtgtatagtgtgtatataataacatcacactggaggtgataaaaaatgaaagtgctcatttctaacacatcagataagccattataccaacaaattaaagagcaaattaaagaagcaatatttactgaagaactgaaagaaggggatgcaatgccctcaataagaaattttgctaatgatttaaaagttagtattttgactattagacgagtgtatgaagaacttgaaaatgaaggttttcttacacgccaagttggaataggaacatttgtttcaactggaaatttagaaatactaagagactcaaagaggcgtatagttgaacaaaaaatggcagatatgattaaggatgcaaaagcactaggaattacacagatagagttacaagaaatgatgggtattctatatgaggaggattaatatggaaaatattttagaagtttataacttaaataagacttataccaatttttcattatctaatataagctttgtattaccagaagattgtataactggatttataggtgttaatggagcaggaaaaacaacaacaattcgttcgatattggatgtcgtaaagcgtgatagtggaaaaataaaaatctttggtaaagatttcgatggaaatgagaaggaattaaaaaatcgaattggagttgtatttgatgattcatatttctatgaggagttgtcaatgtcagaaatgaaaagtattattgcaccttcatatgataattggtgtgaagaagattatcaacaaaatatgaagcgttttaatcttaatccaaaacaaaagattgatacactttcaaaaggaatgaaaatgaaatttgctttagcattagcattatcgcataaagctgagtttttaattatggatgagcctacaagtggtttagacccactaatccgtagtcagatacttgacatactaacagaatatatgaagaaatgtggtcgtggtgttttcttttctactcatataacatctgatttagacaaaatagcagatatgattgttatgattgacaatggacgtattatattagagcgtgaaaaagatactctattggatgaacatagaaaagtaaaaggggatattcaatttctaaatgatgaaatcaaaaaattatttttaaatttagaaattacaggttatggttttatagggattacctcaaaaattaatgaagtgcaaaaaaatatgccagatattttaatagagcgtcctacaattgaagatattatgcttgcatatattgaaaggagagagtaattatgttgattcatttagttaaaaaagatattctgattgtaaaaaaatatgtattgttgatattgtttattgcaataggaatcccattatttatattatggcgtttacctccatttgcacaaatattgggatttgtactatcaattatattttcagaatttatgctgtgccagtatctattattaaaggagagtcaatattcaaaagcatctgtattactttgttcaactccttatcctagacgtggcttagttcaatctaagtatgttttatttgcaatggtatttatctattgtacattagtttactggattgaaaatttacttattccacaaataggaacttttgacttaacatatattttgattgttttattaataagttctattatttatggagtttatatgcctattcaatacaaattaggatatgaaacaacaaaattctttttcgtgatgataatcatggcttcatcatttgtattaccattaactatagctcacagcaattttgaaattccatttatatatcagtatccatccatgatagtgaatattgtattgttccttttaagtttaattatactgttagcttcaatgtttatttctattaaaatttttagtaataaggagcttgtataaggtaagggggaattttatatgccacatttgccagattgggctgttttactttgtatcttacttccaatagtatataaagcttgtcagatatttaaaagtaaaaaatagagtacatatttatattgccatttttattgagtgaagttagatggtatgaatttaaaaggttacttgaaaataaagttacttggtgtgggagagtaacatcataatattatagattatatgtttcttgtgaatcaatttgtattttttaatagataatatccagtaattttattttccattgattattttcaattatgagtatgattgtgtgtattgtataccatcttttaaggtgtttttaaaaaattatatcgtcaaaatataaatctaaggaatcctataaataaagcttttcaattttagaaaactaataaaaagtaggaagttaataaaaagaagctgtctcaaaatagagataagcttctttttcattgctgaaatgacgaaaatataattgatttaatataaaaaagagtgctttatgaactatttattttgaacagtagatacacttgcactcaatttagttactcctaagctttatgaactaaaagtttattttgaagcctatttttctaaataatcatctatatacagtattgcgtttcttttatttattcataatttattttcttattaaagtttttctatattactttacttttaattttatacgaattatcaaaaataaaatagttattagaaaaaaataaaagtaattgcaaagattgcaattacttacttctatattaattactataccataaaataacaaaaaaatcaagtcgagtaatccttcaacttaagtgatatactaggtattaataatttttaattaataaaatataactagaggaaaatctacattttctcaatttctttaattaaattgacctctaattaagtaattataaggagaaaaattatgaatttagcaaagggattagatgttttaaaaatttcatcaaatgtattcggtgaagataaagttatgtatattcctgtaatctacacagaagatgatgcaacacttattgacacaggtcttccgggtcaaggtgatttaataattgatgctcttaataaaagtaacacgagctttgataggttaaaaaatataataattactcatcatgatatagaccatataggaaacataaattatctaagagaaaaatctaagaataatatcaaagtatatgcatacaaaagtgaagtcagttatataacaggagaagaaactccttttaaactttatatgttggaacaaatggtagataaaattgatgataagatgcttagtatgctaaatgttatggtacttggatttaaatcatcatatactaaagtagatgtgtcattagataaccatgaaaaattgaatctaggtgaggaaatagaagttatacatacaggaggtcacactagaggtcacatatgtctttatttaaaagagtctaaagtacttattgctggagatttgttacaggtagaaaatggagaacttacgcctgttgatgtaatgcacagcaacaaacaagagttaaaagatgctattaaaaatataagtaattatgatatagaaacgatagtttttagtcatggtggattatatcaaagagacataattggaacattgaaaaacctaattattgagtagtactatatgatttacaataatttcttaaattacttaaaattatatctaaagatgtagaatcaaaattaaatataagtaataagaattttgctttaaaattatacttaagtgttaagtatgatacgtagtattacaagtattttagaatataattttttatagtaattttaaggttctacaatacttcagttgaaaaatatttaacagcatagtataataggaaagaaaatattttaaataaactttagtatacaaagtgaagaaaaatatttaaattatatataatattgtagagtgaggtaaaatatttaagttatatatcataatacagagtgaagaaaaatatttagataatgtaccataatacaaggtgagtaaaaatatttaaagcatgtataataatgcaaagcgaagaaaaatatttaaataatgtaccataatgcagagtgagtaaaaatatttaaataatgtgttataatacaaagcgaataagattatttaaagcatgtattataatataaagtgagtaaaaatatttaaatcatgtatcataatataagcagagtgaagaaaaatatttaaataatatatcataatgtagagtgaggtaaaatatttaagttatgtatcataatacaaagtaaagaaaatcatttaaattatatatcataaaaataatatgaaatattgaacactcataatattggaggctttaatattttaattgataggttacattatttataacattaaaaatacaatttacataaaatagacatatgaaaaataaaaaattatataataattatgggaatgaggttctcccttggatgataatatcctaaactgccaatgagctgatgacttctatgatatcatagatgccaccagctttttttgttgtttaaatcgataaaatggaggtgaattacttactaaatttttattttttaaatttgaagaaatatttaattaatagaaaaaacagtagattatatgttaattattttattaagaatgggttaagagtatacctatatcctatcaatttaaaaaacaattatgatagtcattacattgactacagttgatgcaataaaactttcaaaaaatcttatgatgcaaatagaaaggaattaaaatgatagaaaaatttaaaactttaatatggattaaaatgataataagaattaaaagcgtttataaaacatatggtggactatttttgttaggactcataggtataccagttggtgcaattataggtcttatagacaccatatttggaacggttcttctaaaagttacagatattcgagaaacatatccaatgtatctgataccatttttagcagtagtaggagttgttattgcttattgctattttaaatttggaggaaaaagtagtaaaggaatgaatctaatatttgaggtagggcatggagaagaagaaattattcctttaagattggttccatttataatatcaggtacatggttaacccatttatttggtggtagtgcaggacgagaaggagttgctgttcagattggtgcaactttttcacattgggtaggtaaaaggttgcctataaaaaatgcttctagtatttttctagtaactggtatagcagctggttttgcaggattatttgagacaccaatagcagcaatactatttgctatggaggttttggtagctggttcactggagtatcaatcgctttttcctgcgtttactgcttcttttacagcaagtgcagtatcaaaaactttagggttagagaaattttcttttgcactttcttctaaagttgtatttgacttaccaatattttggaagcttattgttttaggaattatttttggaatggttggtggagcatttgcatggtgcctgaaattgtcaaaaagaaaaataggtaatagattaaaaaatcctatgataaggattgctattattggagtatgtcttagtgtattattccttttattttataaaggaagatattcaggtttagggacaaatttaattcaaaatagtttttatggtggagaaatttattcatttgactggctgttaaagtttatacttacaatactgactttgtcagcaggttttcaaggaggagaggttacacctttgttttccattggagctagtcttggtgtattgttagcaggattttttaatttgccaattgaattagttgcagcgcttggctatgctagcgtctttggcagtgctacaaatactttttttgctcctgtatttataggggcagaagtttttggatacagctatttaccttatttctttgtagtatgcgctatttcatatatatttaatatggataaatctatttattcactacaaaaaatttcaacgaaacaataaataaaacaacataatgtatgattataagagaaagaatattagagaaaggatagggtaggaatatgttgacaagtttagctttgatttttttattaggaatggcctcgggaggtatttttgagaagataaaattacctagcttattgggaatgttacttacaggaatcatattgggttcatatgttttaaatttgattgataattcaatactagatatttcttctgaccttagaaagattgcattgattattatattaacaagggctggattatctttagatataaacgatttgaagaaagtgggaagacctgctgtacttatgtgctttattccagctacttttgaaattatcggaatgatagttttagcaccaaaattactaggcgtttctatattggaagcagcagtcatgggtgcagtagtaggagcagtttctcccgcaattattgtacctaaaatgcttaaattaatggaagaaggttatggtacagaaaaaagtattccacagatgcttttagcaggaacttctatagacgatattttcgtaattgtgatgtttacagtattcacaggattggcacaaggaaatagtatatcagctattagttttttacaaattccagtatcaattatattaggtgtaatagttggagcagtgattggaatctgtttagcagtattttttaagaaggttcatatgagagattctgctaaaggggtgttgcttttaagtatctcatttttaatgataagtttggagactgctttagagggtattgtgccattttctggattattagcagttatgaatattgggattttccttcagataaaatatcgtgtagttgcaagaagattgtctgtaaagtattcaaaactatgggttggtgctgaaattctcttgtttgttttggtaggggcaacagtagatataagttatgcatttaaagcaggaattggagctgtaattttaatatttggagttcttttattccgtatggtaggagtattcttctgccttattaagacaaatttgacaataaaagaaagattgttctgtatgattggctatattccaaaggctacagtacaggcagcaataggaggtgtaccacttgcaatggggatagcatctggacaacttattttgacattagcggttctcgctatacttataactgcacctcttggagcttttggaattgatgtaacttataaaaaattattaacttctgtagaaggtaagagtaagtaagaataaaaataaagattattttaagtgataaattatattttggaaaaaactatattattgagtacaatgttagaaaatcatttgagtgattacagaaggtagaagtttatatcggattttaaggcatgtgatgattattagaattgattttgtgaaattgttattgtaatatttaattatatagataaagaagcggagtgataactatgtatttaaaaaaattatcaaaattagagttagttattatgaaatttatttggaatttagatataaaaaccaattcatatgagattattgattatatgaaagaagagcataatttaccagaaaaagtggctttaaaaattttatcaaaattatcaaagaaaagattcttatatgttcaagaaacaggcaagtgtatgtattatacagttgcaataaaagaaaagacatatttagagtttatatcaagaaatgtgcaaaatcttttgaagaataattttataaggaatttattagtatcatttcacgaagaggagctaacagaggaaaagataaagtcgttagaaaactgggtagtaaattgggaagaagcttatatataaatgttattatttttattacaatttagataattttggttttgtaagctctgcaactatttttagatggttgcagagcttatttttattttttattcccttaagcaatacttaaaagtaaacgcatttatatttactaacttcaatcacttctaatacttagattactttttaaaaatattttgatatgtcatctctatagtaatctagaacttgtttctattctttatataaagtttttatgaatgatatatataatattcgttcatttgattaaaaataacaaaatattaaataattctactctgatagtttgttaaaaaaataataaaaaatattaataaacaaaaaaaaaaattatcttaagagaggagaatgttctaaaatataaaaaggtttctagatttcataaaagatactattttagtcttgaaaatatttagtttgaaaagattttaatttaatgattgattaagttaaaaatgtgcatgtaataaattttattttatttattgactaaattataaagtttacataattatttaataattatgtaattgttacttaaaaattgatctattttaaaatctagttataacttcgaaaaagactgaaaattaagaaaaaagaaatataagtataaaaatatatcatatagattttttttattttactttaataaaatgatttgtttttacaatactttattaatataaagtttattgctaaaatactttatttattagaaaaaaattactaattaattattaaaattaatgtatttataatgcgtattttcatataaaatttaatttatttgccgattatataattataatgactgatttaattccaatgttgtcaaaatttttaaataaatcatcattataaatataagagaggatgattttatgcaaaagtctttttatgaattaattgttttagcaagaaataactcagtagatgatttgcaagaaattttatttatgtttaagccattagtaaaaaaacttagtagagttttacattatgaagagggagaaacagatttaataatattttttattgaattaataaaaaatattaaattaagtagcttttcagaaaaaagcgatgctattatagtcaaatatattcataaatcattactgaataagacttttgagttgtctagaagatattctaaaatgaagtttaattttgtagaatttgatgaaaatatcttaaatatgaaaaataattatcaaagtaagtctgtttttgaggaagatatttgttttttcgaatatattttgaaagaattatctggtattcaaagaaaagttattttttataaatatttaaaaggatattctgatagagaaatatcagtgaaattaaaaatatctagacaagctgttaataaggctaaaaatagagcatttaaaaaaataaaaaaagactatgaaaattattttaacttgtaattaatgaatttaaagaaatatttacaatagaaatcaaattttagaattaactttattgtaaaatcaataacttaatctaagaatatcttaatttttatattttatatagaacaaagtttacatatttatttcagacaacgtctttattcaatcgaagagcaaattaatcaactgagtgtcttcaatttaaaatgttaggaagtgaatgtatatgaaaacctaagtagatattagtatattttataaatagaaaggaggatatataaaagagttttagcatttagatgtaaaaatattcaataaaaatattatagtaaaggagaaaattttatgagtttagttaatagaaaacagttagaaaaaatggcaaatgtaagatttcgtgttcaggaagatgaatatgtagcaatattggatgctttagaagaatatcataatatgtcagagaatactgtagtcgaaaaatatttaaaattaaaagatataaatagtttaacagatatttatatagatacatataaaaagtctggtagaaataaagccttaaaaaaatttaaggaatacctagttacagaagtattagagctaaagaataataatttaactccagttgagaaaaatttacattttgtttggattggaggtcaaataaatgacactgctattaattatataaatcaatggaaagatgtaaatagtgattataatgttaatgttttttatgatagtaatgcatttttgataaacacattgaaaaaaactatagtagaatcagcaacaaatgatacacttgaatcatttagagaaaacttaaatgaccctagatttgactataataaattttacagaaaacgtatggagataatctatgataagcagaaaaatttcataaattactataaaactcaaagagaagaaaatcctgaccttataattgatgatattgtaaagatatatctttcaaacgagtattcaaaggatatagatgaacttaattcctatattgaagagtcattaaataaagttacagaaaatagtgggaatgatgttagaaactttgaagaatttaaaggtggagagtcattcaaattatatgaacaagagttggtagaaagatggaatttggcagctgcttctgacatattaagaatatctgccttaaaagaagttggtggtgtatatttagatgttgatatgttaccaggaatacaaccagacctatttgagtctatagagaaacctagttcagtaacagtggatttttgggaaatggtaaaattagaagctataatgaaatacaaagaatacataccaggatatacttcagagcattttgatatgttggatgaagaagttcaaagtagttttgaatctgttctagcttctaagtcagataagtcagaaatattctcatcacttggcgatatggaggcatcaccactagaagttaaaattgcatttaatagtaaaggtattataaatcaaggactaatttctgtgaaagactcatattgtagcaatttaatagtaaaacaaatcgagaacagatataagatattgaataatagtttaaatccagctattagcgaggataacgatttcaatactacaacgaatgcttttattgatagtataatggctgaagctaatgcagataatggtagatttatgatggaactaggaaagtatttaagagttggtttcttcccagatgttaaaactactattaacttaagtggccctgaagcatatgcggcagcttatcaagatttattaatgtttaaagaaggtagtatgaatatccatttgatagaagctgacttaagaaactttgaaatctctaaaactaatatttctcaatcaactgaacaagaaatggctagcttatggtcatttgacgatgcaagagctaaagctcaatttgaagaatacaaaaaaaattactttgaaggttctcttggagaagatgacaatcttgacttttctcaaaatacagtagttgacaaggagtatcttttagaaaaaatatcttcattagcaagaagttcagagagaggatatatacactatattgttcagttacaaggagataaaattagttatgaagcagcatgtaacttatttgcaaagactccttatgatagtgtactgtttcagaaaaatatagaagattcagaaattgcatattattataatcctggagatggtgaaatacaagaaatagacaagtataaaattccaagtataatttctgatagacctaagattaaattaacatttattggtcatggtaaagatgaatttaatactgatatatttgcaggtcttgatgtagattcattatccacagaaatagaaacagcaatagatttagctaaagaggatatttctcctaagtcaatagaaataaacttactgggatgtaacatgtttagctattctgtaaatgtagaggagacttatcctgggaaattattacttagagttaaagataaagtatcagaattaatgccatctataagtcaagactctattatagtaagtgcaaatcaatatgaagttagaataaatagtgaaggaagaagagaattattggatcattctggtgaatggataaataaagaagaaagtattataaaggatatttcatcaaaagaatatatatcatttaatcctaaagaaaataaaattatagtaaaatctaaaaatttacctgaattatctacattattacaagaaattagaaacaattctaattcaagtgatattgaactagaagaaaaagtaatgttagcagaatgtgagataaatgttatttcaaatatagatacacaagtggtagaaggaaggattgaagaagctaaaagcttaacttctgactctattaattatataaagaatgaatttaaactaatagaatctatttctgatgcactatacgatttaaaacaacagaatgaattagaagagtctcattttatatcttttgaggatatattggagactgatgaaggctttagtataagatttattgataaagaaactggagaatctatatttgtagaaactgaaaaggcaatattctctgaatatgctaatcatataactgaagagatttctaagataaaaggtactatatttgatactgtaaatggtaagttagtaaaaaaagtaaatttagatgctacacatgaagtgaatactttaaatgctgcattttttatacaatcattaatagaatataatagttctaaagaatctcttagtaatttaagtgtagcaatgaaagttcaagtttatgctcaattatttagtactggtttaaatactattacagatgcagccaaagttgttgaattagtatcaactgcattagatgaaactatagatttacttcctacattatctgaaggattacctgtaattgcaactatcatagatggtgtaagtttaggtgcagcaatcaaagagctaagtgaaacaagtgacccattattaagacaagaaatagaagctaagataggtataatggcagtaaatttaacagcagctacaactgcaatcattacttcatctttaggaatagctagtggatttagtatacttttagttcctttagcaggaatttcagcaggtataccaagtttagtaaacaatgagcttatcctaagagataaagcaacaaaagttgtagattattttagtcatatatcattagctgagtctgaaggagcatttacttcattagatgataaaataatgatgccacaagatgatttagtaatatctgagatagactttaataacaattcaataactttaggtaaatgtgaaatctggagaatggaaggtggctcaggtcatactgtaactgatgatatagatcacttcttttcagcaccatcaataacatatagagagccacacttatctatatatgacgtattggaagtacaaaaagaagaacttgatttgtcaaaagatttaatggtattacctaatgctccaaatagagtatttgcttgggaaacaggatggacaccaggtttaagaagcttagaaaatgatggcacaaaactgttagaccgtataagagataactatgaaggtgagttttattggagatattttgcttttatagctgatgctttaataacaacattaaaaccaagatatgaagatactaatataagaataaatttagatagtaatactagaagctttatagtcccagtgataactacagaatatataagagagaaattatcatattctttttatggttctggaggaacttatgcattatctctttctcaatacaatatgaatataaacatagaattaaatgaaaatgatacttgggttatagatgtcgacaatgtcgtaagagatgtcactatagaatctgataaaattaaaaaaggagatttaatagagaatattttatctaaattaagtattgaagacaataaaattattttagataatcatgaaattaatttctctggaacattaaatggaggtaatggatttgtatctttaacattctcaatcttagaaggaataaatgcagttatagaagttgatttattatctaaatcatataaagttcttatttctggtgaactaaaaacattgatggcaaattcaaattctgttcaacagaaaatagattatataggattgaacagcgaattacaaaaaaatataccttatagttttatggatgataaaggaaaagaaaatggatttattaattgttctacaaaagaaggtttatttgtatctgaattatctgatgtagttcttataagtaaagtttatatggacaatagtaaacctctatttggatattgtagtaatgatttgaaagatgttaaagtcataactaaagatgacgttattatattaacaggatattatttaaaagatgatataaaaatctctctttcttttactatacaagatgaaaatactataaaattaaatggagtatatttagatgaaaatggagtagctgaaatattgaaatttatgaataaaaaaggtagtacaaatacttcagattctttaatgagctttttagaaagtatgaatataaaaagtattttcataaattccttacaatctaatactaagcttatattagatactaattttataataagtggtactacttctattggtcaatttgagtttatttgtgataaagataataatatacaaccatatttcattaagtttaatacactagaaactaaatatactctatatgtaggtaatagacaaaatatgatagtagaaccaaattatgatttagatgattctggagatatatcttcaactgtcattaatttttctcagaaatacctttatggaatagacagttgtgttaataaagttataatttcgccaaatatatatacagatgaaataaacataacacctatatatgaagcaaataatacttatccagaagtgattgtattagatacaaattatataagtgaaaaaatcaatattaatatcaatgatttatctatacgatatgtatggagtaatgatggaagtgattttattcttatgtcaactgatgaagagaacaaggtatcacaagttaaaataagatttactaatgtttttaaaggtaatactatatcagataagatatcttttaattttagtgataagcaagatgtatctataaataaagttatttcaacatttacaccttcatattatgtggaaggattacttaattatgatttaggtctgatttctttatacaatgagaaattttatattaataactttggaatgatggtgtctggattagtatatattaatgattcattatattatttcaagccaccaataaagaacttgataactggatttacaactataggtgatgataaatactactttaatccagataatggtggagctgcttcagtcggagaaacaataattgatggcaaaaactactacttcagccaaaatggagtgttacaaacaggtgtatttagtacagaagatggatttaaatattttgctccagcagatacacttgatgaaaatctagagggggaagcaattgattttactggcaaactaactattgatgaaaatgtttattattttggagataattatagagcagctatagaatggcaaacattagatgatgaagtgtactattttagtacagatacaggtagagcttttaaagggctaaatcaaataggtgatgataaattctatttcaactctgatggtattatgcaaaaaggatttgttaatataaatgataagacattctattttgatgattctggtgtgatgaagtcaggatatactgaaatagatggaaaatatttttactttgctgagaatggagaaatgcaaataggagtatttaatacagcagatggatttaaatattttgctcatcatgatgaagatttaggaaatgaagaaggtgaagcactttcatattctggtatacttaattttaacaataagatttattattttgatgattcatttacagcagtagttggatggaaggatttagaagatggttcaaaatattactttgatgaagatacagcagaagcatatataggtatctcaataattaatgatggtaaatattattttaatgattctggaatcatgcaaattggatttgtcacaataaataatgaagtattttatttctctgattctggaatagtagaatctggaatgcaaaatatagatgataattatttctatatagacgaaaatggtctagttcaaattggtgtatttgacacttcagatggatataaatactttgcaccagctaatactgtaaatgataatatctatggacaagcagttgaatatagtggtttagttagagttggtgaagatgtatattattttggagaaacatatacaattgagactggttggatatatgatatggaaaatgaaagtgataaatattatttcgatccagaaactaaaaaagcatataaaggtattaatgtaattgatgatataaaatactattttgatgagaatggaataatgagaacaggtcttataacatttgaagataatcattactattttaatgaagatggtattatgcaatatggttatctaaatatagaagataagacgttctactttagtgaagatggtattatgcagattggagtatttaatacaccagatggatttaaatattttgcacatcaaaatactttagatgagaattttgagggagaatcaataaactatactggttggttagatttagatgaaaagagatattattttacagatgaatatattgcagcaactggttcagttattattgatggtgaggagtattattttgatcctgatacagctcaattagtgattagtgaatagataaaaatacgttaaatatatcctcttatacttaaatatataaaaataaacaaaatgatacactacataaagtgttctatctaatatgaagatttaccaataaaaaggtgaactatgatgaatgcacagtagttcacctttttatatttctaatggtaacaaaatatttttttatataaacctaggaggcgttatgaatatgacaatatcttttttatcagagcatatatttataaagttagtaattttaactatatcatttgatacattattaggatgtttaagtgcaataaaaagtcgtaaatttaattctagttttggaatagatggaggaatcagaaaagtagcaatgatagcatgtatattttttttatcagtagttgacattcttacaaagtttaactttttatttatgttaccacaagattgtatcaattttttaagactaaaacatcttggaatatctgaatttttctctattttatttattttatatgaaagtgtaagcatattaaaaaatatgtgcttatgtggattaccagtacctaagagattaaaggaaaaaatagcagttttactagatgcaatgacagatgaaatgaatgctaaggatgaaaagtaagtaatggtagatataataaaaatattaacaaataaaaagtgttatccaaataagaatagctgaaagttatcataattcatgaaactgataatgaaaacgagggagcagatgccaagagacacacaagtattaaatacatataatttcgaagcaagtgttcattactatatggatgacaaggtagtatatcaaacattggttcacaaagatggtgcatggtcagttggtaaaatctattaagctacattagttacagatatcacaaactataatagttaaacatagaaatatgtgtaaattgtgatggaaattattcaaaaacacaaaaatacgtgatgaaggacaaaatgatagagaaaataagtatcaaaccttaataaatgatttaattgatagtttaaaagttataggaaaaatatataaagaaataaaaacattaaaaaaatataagatatgtttacaaattactatcagacaatctccttatctaatagaagagtcaattaactaattgagtatctttaaattgaaatgttaggaagtgatttaaatatgaaaacttaaattataaaaaatcaatattaatttatctttaaaaaatagaaaggagtgtataagatttattttcaaagtttaaaaacaagaaaatcaatttaaatttcagaaggaataaatgtggttatagaagtggatttattatcaaaaataatagtactaggaggtttttatgtctttaatatctaaagaagagttaataaaactcgcatatagcattagaccaagagaaaatgagtataaaactatactaactaatttagacgaatataataagttaactacaaacaataatgaaaataaatatttacaattaaaaaaactaaatgaatcaattgatgtttttatgaataaatataaaaattcaagcagaaatagagcactctctaatctaaaaaaagatatattaaaagaagtaattcttattaaaaattccaatacaagtcctgtagaaaaaaatttacattttgtatggataggtggagaagtcagtgatattgctcttgaatacataaaacaatgggctgatattaatgcagaatataatattaaactgtggtatgatagtgaagcattcttagtcaatacactaaaaaaggctatagttgaatcttctaccactgaagcattacagctactagaggaagagattcaaaatcctcaatttgataatatgaaattttacaaaaaaaggatggaatttatatatgatagacaaaaaaggtttataaattattataaatctcaaatcaataaacctacagtacctacaatagatgatattataaagtctcatctagtatctgaatataatagagatgaaactttattagaatcatatagaacaaattctttgagaaaaataaatagtaatcatgggatagatatcagggctaatagtttgtttacagaacaagagttattaaatatttatagtcaggagttgttaaatcgtgggaatttagctgcagcatctgacatagtaagattattagccctaaaaaattttggcggagtatatttagatgttgatatgcttccaggtattcactctgatttatttaaaacaatacctagacctagctctattggactagaccgttgggaaatgataaaattagaggctattatgaagtataaaaaatatataaataattatacatcagaaaactttgataaacttgatcaacaattaaaagataattttaaactcattatagaaagtaaaagtgaaaaatctgagatattttctaaattagaaaatttaaatgtatctgatcttgaaattaaaatagctttcgctttaggcagtgttataaatcaagccttgatatcaaaacaaggttcatatcttactaacctagtaatagaacaagtaaaaaatagatatcaatttttaaaccaacaccttaacccagccatagagtctgacaataacttcacagatactactaagatttttcatgattcactatttaattcagctaccgcagaaaactctatgtttttaacaaaaatagcaccatacttacaagtaggttttatgccagaagctcgctccacaataagtttaagtggtccaggagcttatgcatcagcttactatgatttcataaatttacaagaaaatactatagaaaaaactttaaaagcatcagatttaatagaatttaaattcccagaaaataatctatctcaattgacagaacaagaaataaatagtctatggagctttgatcaagcaagtgcaaaatatcaatttgagaaatatgtaagagattatactggtggatctctttctgaagacaatggggtagactttaataaaaatactgccctcgacaaaaactatttattaaataataaaattccatcaaacaatgtagaagaagctggaagtaaaaattatgttcattatatcatacagttacaaggagatgatataagttatgaagcaacatgcaatttattttctaaaaatcctaaaaatagtattattatacaacgaaatatgaatgaaagtgcaaaaagttactttttaagtgatgatggagaatctattttagaattaaataaatataggatacctgaaagattaaaaaataaggaaaaagtaaaagtaacctttattggacatggtaaagatgaattcaacacaagcgaatttgctagattaagtgtagattcactttccaatgagataagttcatttttagataccataaaattagatatatcacctaaaaatgtagaagtaaacttgcttggatgtaatatgtttagttatgattttaatgttgaagaaacttatcctggtaagttactattaagtattatggacaaaattacttccactttacctgatgtaaataaagattctattactataggagcaaatcaatatgaagtaagaattaatagtgagggaagaaaagaacttctagctcactcaggtaaatggataaataaagaggaagctattatgagcgatttatctagtaaagaatacattttttttgattccatagataataagctaaaagcaaagtccaagaatattccaggtttagcgtcaatatcagaagatataaaaacattattacttgatgcaagtgttagtcctgatacaaaatttattttaaataatcttaagcttaatattgaatcttctattggtgattacatttattatgaaaaattagaacctgttaaaaatataatccacaattctatagatgatttaatagatgagttcaatctacttgaaaatgtatctgatgaattatatgaattaaaaaaattaaataatctagatgagaagtatttaatatcttttgaagatatctcaaaaaataattcaacttattctgtaagatttattaacaaaagtaatggtgaatcagtttatgtagagacagaaaaagaaattttttcaaaatatagcgaacatattacaaaagaaataagtactataaagaatagtataattacagatgttaatggtaatttattggataatatacagttagatcatacttctcaagttaatacattaaacgcagcattctttattcaatcattaatagattatagtagcaataaagatgtactgaatgatttaagtacctcagttaaggttcaactttatgctcaactatttagtacaggtttaaatactatatatgactctatccaattagtaaatttaatatcaaatgcagtaaatgatactataaatgtactacctacaataacagaggggatacctattgtatctactatattagacggaataaacttaggtgcagcaattaaggaattactagacgaacatgacccattactaaaaaaagaactagaagctaaggtgggtgttttagcaataaatatgtcattatctatagctgcaacggtagcttcaattgttggaataggtgctgaagttactattttcttattacctatagctggtatatctgcgggaataccttcattagttaataatgaattaatattgcatgataaggcaacttcagtggtaaactattttaatcatttgtctgaatctaaagaatatggccctcttaaaacagaagatgataaaattttagttcctattgatgatttagtaatatcagaaatagattttaataataattcgataaaactaggaacatgtaatatattagcaatggaggggggatcaggacacacagtgactggtaatatagatcactttttctcatctccatatataagctctcatattccttcattatcagtttattctgcaataggtataaaaacagaaaatctagatttttcaaaaaaaataatgatgttaccaaatgctccttcaagagtgttttggtgggaaactggagcagttccaggtttaagatcattggaaaataatgggactaaattgcttgattcaataagagatttatacccaggcaaattttactggagattctatgcctttttcgattatgcaataactacattaaaaccagtgtatgaagacactaatactaaaattaaactagataaagatactagaaactttataatgccaactataactactgacgaaattagaaacaaattatcttattcatttgatggagcaggaggaacttactctttattattatcttcatatccaatatcaatgaatataaatttatctaaagatgatttatggatatttaatattgataatgaagtaagagaaatatctatagaaaatggtactattaaaaaaggaaatttaatagaagatgttttaagtaaaattgatataaataaaaataaacttattataggcaatcaaacaatagatttttcaggtgatatagataacaaagatagatatatattcttgacttgtgagttagatgataaaattagtttaataatagaaataaatcttgttgcaaaatcttatagtttgttattgtctggggataaaaattatttgatatccaatttatctaatactattgagaaaatcaatactttaggcctagatagtaaaaatatagcttacaattacactgatgaatctaataataaatattttggagctatatctaaaacaagtcaaaaaagcataatacattataaaaaagacagtaaaaatatattagaattttataatggcagtacattagaatttaacagtaaagactttattgctgaagatataaatgtatttatgaaagatgatattaatactataacaggaaaatactatgttgataataatactgataaaagtatagatttctctatttctttagttagtaaaaatcaagtaaaagtaaatggattatatttaaatgaatccgtatactcatcttaccttgattttgtgaaaaattcagatggacaccataatacttctaattttatgaatttatttttgaacaatataagtttctggaaattgtttgggtttgaaaatataaattttgtaatcgataaatactttacccttgttggtaaaactaatcttggatatgtagaatttatttgtgacaataataaaaatatagatatatattttggtgaatggaaaacatcgtcatctaaaagcactatatttagcggaaatggtagaaatgttgtagtagagcctatatataatcctgatacgggtgaagatatatctacttcactagatttttcctatgaacctctctatggaatagatagatatatcaataaagtattgatagcacctgatttatatacaagtttaataaatattaataccaattattattcaaatgagtactaccctgagattatagttcttaacccaaatacattccacaaaaaagtaaatataaatttagatagttcttcttttgagtataaatggtctacagaaggaagtgactttattttagttagatacttagaagaaagtaataaaaaaatattacaaaaaataagaatcaaaggtatcttatctaatactcaatcatttaataaaatgagtatagattttaaagatattaaaaaactatcattaggatatataatgagtaattttaaatcatttaattctgaaaatgaattagatagagatcatttaggatttaaaataatagataataaaacttattactatgatgaagatagtaaattagttaaaggattaatcaatataaataattcattattctattttgatcctatagaatctaacttagtaactggatggcaaactatcaatggtaaaaaatattattttgatataaatactggagcagcttcaactagttataaaattattaatggtaaacacttttattttaataataatggtgtgatgcagttaggagtatttaaaggacctgatggatttgagtattttgcacctgccaatactcagaataataacatagaaggtcaggctatagtttatcaaagtaaattcttaactttgaatggcaaaaaatattattttgataatgactcaaaagcagtcactggatggaggattattaacaatgagaaatattactttaatcctaataatgctattgctgcagtcggattgcaagtaattgacaataataagtattatttcaatcctgacactgctatcatctcaaaaggttggcagactgttaatggtagtagatactactttgatactgataccgctattgcctttaatggttataaaactattgatggtaaacacttttattttgatagtgattgtgtagtgaaaataggtgtgtttagtggctctaatggatttgaatatttcgcacctgctaatacttataataataacatagaaggtcaggctatagtttatcaaagtaaattcttaactttgaatggtaaaaaatattactttgataataactcaaaagcagttaccggatggcaaactattgatagtaaaaaatattactttaatactaacactgctgaagcagctactggatggcaaactattgatggtaaaaagtattactttaatactaacactgctgaagcagctactggatggcaaactattgatggtaaaaaatattactttaatactaacacttctatagcttcaactggttatacaattattaatggtaaatatttttattttaatactgatggtattatgcagataggagtgtttaaagtacctaatggatttgaatactttgcacctgctaatactcataataataacatagaaggtcaagctatactttaccaaaataaattcttaactttgaatggtaaaaaatattactttggtagtgactcaaaagcaattactggatggcaaaccattgatggtaaaaaatattactttaatcctaataatgctattgctgcgactcatctatgcactataaataacgacaagtattactttagttatgatggaattcttcaaaatggatatattactattgaaagaaataatttctattttgatgctaataatgaatctaaaatggtaacaggagtatttaaaggacctaatggatttgagtattttgcacctgctaatactcataataataacatagaaggtcaggctatagtttaccagaataaattcttaactttgaatggcaaaaaatattattttgataatgactcaaaagcagttactggatggcaaactattgatagtaaaaaatattactttaatcttaacactgctgttgcagttactggatggcaaactattgatggtgaaaaatattactttaatcttaacactgctgaagcagctactggatggcaaactattgatggtaaaagatactactttaatactaacacttatatagcttcaactggttatacgattattaatggtaaacatttttattttaatactgatggtattatgcagataggagtgtttaaaggacctgatggatttgaatactttgcacctgctaatactcataataataacatagaaggtcaagctatactttaccaaaataaattcttaactttgaatggtaaaaaatattactttggtagtgactcaaaagcagttaccggattgcgaactattgatggtaaaaaatattactttaatactaacactgctgttgcagttactggatggcaaactattaatggtaaaaaatactactttaatactaacacttatatagcttcaactggttatacaattattagtggtaaacatttttattttaatactgatggtattatgcagataggagtgtttaaaggacctgatggatttgaatactttgcacctgctaatacggatgctaacaacatagaaggtcaagctatacgttatcaaaatagattcctatatttacatgacaatatatattactttggcaatgattcaaaagcggctactggttgggcaactattgatggtaatagatattacttcgagcctaatacagctatgggtgcgaatggttataaaactattgataataaaaatttttactttagaaatggtttacctcagataggagtgtttaaaggacctaatggatttgaatactttgcacctgctaatacggatgctaacaatatagatggtcaagctatacgttatcaaaatagattcctacatttacttggaaaaatatattactttggtaataactcaaaagcagttactggatggcaaactattaatagtaaagtatattactttatgcctgatactgctatggctgcagctggtggacttttcgagattgatggtgttatatatttctttggtgttgatggagtaaaagcccctgggatatatggctaaaatatatgtttgacaaaaaattattcctgtgatactcagaaattatttttatataataaatattgagatttaattaaaagtcatgtgttattgtaatacatgacttttagttaaaatttttctatcatttaataatctattattcttgactattttataataaaattcatatatggaaatattaatactaaataattaatagttgatagaaaatagataatatgctaaaagcaaaaactaatttagagccttgtaactgtttatttgcaattataaaaacatctttaaacatattgactataatataaaatattaactataatacaaaacaatattaattaattttctctacagctatccctggtatggttatttttccacccatagttgattcataagttatagttccagcacttatacctcttatagttatgtaatcatcctctaacactcttgaaggagttattgattttttataactacatagtacgaccttatcataatttccagacacagctaatcttatttgcacctcatcaccatcttcaataacttgaataaccttaccttcaaattttacctttttgtacttataatcatcaggtgttctagctaattggtcataagtaataccagtatcatatcctttcttctcttcttcttcttttttacgttgttcttcagcctttttagcttcttcagctttacgttgattttcagcttcaatagctttcttttcgtcgtctttcattttgaaccatggttcagcatcagacaatttgctatttaaagtttctatttctgttttttgagaatctataactgatgtttgattagaaatgacctcctcatggtcttcagaacaagctggtgaggatatattgccaaaaaacacaccaaaataaatgccagtagagcaatatcctttgtgctcttaaagaatttaattattttcttagagcttccttttctttcattactaaattcgttaccctcattttttttagaaaacataatacaatctcccttttattagatatattttattttaaaatttaaaaacttaaaataactagttgactaaaaattatatattcatattttcctaaaatatatttcccctaagcataattttacaaaataaatcaagaagattcaatatattttgaaaaatgaggtaaaaatgtcagattataatataattttcttgaaggtgaattttatatattaaatgaaacataaagtattttatttgtataaaactatattatgatgtaattaaatgattcagtactttagaggtggtaaaatatagatagatgaaagagcataaataaagtgatataataaaaaattaaatattaactataataaaaaaatatctggtactaagtataatacaaaaataatatatcagaaagaaggtgaagtatgggagaactacaaaaaattccaggggtagggaaagcaacagaaaaatctttaatcatgttaggatatacaactattaaatcacttaaagatgcaaacccagcacaaatgtatgaaaaggaatgtttaatgcgtggacagcacatagacagatgtcagttatatgtatacagatgtgcagtatattttgcatcaactgaaaatccagaaccagaaaaattaaagtggtggtattggaaagattaaaaaatcaaaaaagttagatataaaaaagagttgaatatccgtttaaataataaaaactaatactcaactcttttttagtcgtaaattttatgtaaatctatttgtatggctaaatatacccatcaataaatgtataaatataccaatcaataaatgactaaacatactacctaacaaaggattaaataaattacttaacaaagcattctaaaacaattaattagaaactgtttcttcaagccattttctacattgcccaatatttaccatagggtcaaagccttggtcttttcccttatttaaaagcatatcacaagggaaagtatcacattcaccacaatgattaagttccttactttcacagcaagttttaaccttacattctccaccccaaaatggtttttccatagttgggcaaccagtgcaatttacttgttctttttttgtacaactgtcacaacagacaccacatcttgattcaaacatgttcaaacatcctttccattatttaaaaatattataaaatgattttagatgactacaaaagtgcaaatagttgattttaagtcatctaaatgttaaacataaaattattaatactggtaaatttataaaaactattccaaaaatatttttgaatatttcaaaacacaataaattacttcaaatccctttgaatattccataacactatagattactttaaatccccttgaatatatttcacagcattatagattgctttaaatctctttgaatatttcataacactatagattactttaaatctctttgaatattctacaagactatagattagtttaaattcctttgaatatttcataacatcataaattagtttaaatctctttgaatattctacaagactatagattagtttaaatccctttgaatatttcataacactatagattactttaaatttctttgaatattctacaagactatagattagtttaaatccctttgaatatttcataacaccatagattactttaaatccctttgaatattctataacactataaattacttttaacttttatataaccataaagtttttatctggcactttaaatggagtttttatatcaaatttgccttccatcgaataaccaaacttaatttaattacacattccaagagtcaaatattcattcaatatatttgataattctatgttatagccataattaaatatagattattaaagttaaatatttatttaatgtattgaatgattttttagctatatttaattaagtttcattatataatataaaaattgtttttgcattaagttttaatataacacataataattttaaataataacattattatatatttttttattttaggagtatatctattatatagtgagtagataaaacatataaaattcaaataaaagatatatatttttaaataaaagggatataaatttcaaaccaaaaagaatataaatttcaaaccaaaaaatatctagcatttaccattaagaaataacatcattctttctaaaatttctattggcaatttcagaaaatactatagtagtaataaatgcaacacatattgtaactatagtgtcattaacatttaaagcagattgctttataacccccatagcactacctaacatagaataagggaaaaatataccaacagcaggttttgctactattaatcccataccaaatagagaaaggcaaagactaataccaataggagttgcaaaacttctaatctttatagacatgtataattgtatagaagctattgaaatagaaataatccaacctttagcaatccaaccagtcaattctttaggtacactaccagaaaaaccaaacatatttcctgcaactatataaaagataacaaagaaaacttgtgtaatagctgtaagtattgaaactactgtaagtttagataaaaagatattttttaaattaactggcagtgtcattacattattccaattatgattcatatgttcaagcctacaaatatatgcacaaaagattgcgattaagataggaaagaaaaattccccataaaaaagactaacttgagtccataagctgtaccattcttttttgagtatgccttgatttagataaaaattaccagaaccaatcaacacacttataagtggcaaagctaataatacataccatataaaagaattttttaactttagaatttctcccaaaactgacttccttaacatttaaatccctcctatacttctttttttaataaatgatttcttccaatataataaattagcattccaattaagaaaactaaaatcgtaatagaaaaattcatatcaattctatagacagatgaacctaaaacattatcataagcataacttaaaggtgataactctaggtaataagaccatataaacaatctacgaataccttgataaaacaaacctgatgtcaaacctataaaactaccaatcatgccaaatgtaattgcaatcatttgatttggaattacagttgcaatccataggtgtagtgcaatgatagcaatacttacaagaattgttcctaatgtgtattttaaaagtaaagatacagaaattgactcaataacccctctaaaatgtccaaacaacacaatagataacacttgcatcaatataggtatagataccaaaatagcagaacataaaaatttggataaataaatactatttaaagatgtcacagaagattttaaaagcttccatgtatctcctttatgttctatatcgcttatgcgtgatgtaattattgatattaagataggaaagaatagaccatttaaacttgcaaaactcataagcatataggaatattcaaatccacctaacatatctggattacgtgtaatagccctatttgaatttacgatacaccacattatttcaacagctacaaataaaaaggtcatcagaataatcttctttcttttaagtttataaaattctagaccaaggtatttcattataaagtcaccgccttaccagtaagttctaggaatatatcttccaagctttttttatgttcttctattctaaatacatctatatttgaatggacaagcataccatttattttagccacatctgagtcttttaaattttcaatagtcaagtacccattttgtataagtgacatatatcctttagtatttaatagcttttgtgcagatacaacattcttagctttgatagcaatctgactttgacctctattatgaagttcttttatgctatcttgaaaaaccagttcgccatgatttattattcctattgatgtggcaatttggtcaatttcacttaaaagatggctagagattagaacagtcatgccgtatttttctggtagagattttattaattctctaatttcctcaatccctgctgggtcgagtccatttgtaggttcatcaagtattaataatttgggaaacttcattattgccatagcaatgccaagacgttgcttcatacctaaagaatattgattaacttttttatttttttgattttctaaccttacaatttttaatgcttcatttacattttttttaggtaaatctaagagtctttgcattatggtcatgttttcaagccctgtaagatgaccatagtatgatggagattctatcaaagaacctatatcttttaaaattgatattctatttttttcatttaactctttacctaaaatattaatatttccttgtgtgggtttagcaagtccaagaagcattttaagagtggtagattttccagctccattaggacccaaaaaaccatatacagctccttgtggaactcttaggtctatatcctttactctaaatattttattgtattcctttgaaagtctttgtgttctaattatcatttccatatgtttcatccccttttttaatctgtgcttattgattcttttaacttatatcagtataataacttggttacatttcagttagctgaagtttaccttacaataaccttaaaagtctatttaggcaaagttgtgaaaatgggtatatggtatactaaaggagggtgatgattatggagtcaataaaagataaaaaaatacttgtggttgatgaccacaaggaattattaaaaatgatagatgaaatcctaagaaaagagggatttagtagagtatttttagcatcaagttatgaagaagctgttagggtatttagaaatgtaaagccagattgtgcaattttagatgttgtattgccagatggagatggtttctctattatgagaaaaattagagagacatctaagataccagttatttttctctctgcaagaggtgaagatgaagatagattgattggtttgggattaggggctgacgattatatagtaaagccatttttaccaaaggaacttactttaaggcttgtgggtatattaaatcgtgtatatgtgcctatagaagaagaggagttgccagtatttaaactgggagattctgttgttgtgaatttaaatagtgcatgtgttgagaaagatgggcaagagatttctttaacagctaaagagcattcgttgcttttaaagttgtatgaaaataaagggagaattgttactaatgattcactatgtcaagccatttggggagatgatatgtatggatatgaaaatacccttatggttcatgttagaagggttagagagaagatagaaaaaactccatctacacctaaacatcttattacagtaagaggtcttggatataagttgatgattaattaattttagatattagaataaaagaaatcaagaggagtgatttaattttggatagtgtaaagtacatattgaggcgatttataggttcaagtatcttgatttcattactttttattgtattaaatatagcaggttttcttctgttttcatatatgctatttgtatctaaatactctgataatttagatacaagtgatagcagagaaataaaatcaaacttgattatgattgaagataatttgattttaaaagatggaaagtttattttagatgattctagtaaggaagtactacataaaaataaagtttgggcaatgttaattgataacaatggagatagaatatggggatttgatttaccaaaagaaattccaagtcattatactttgacagatgtagcaaagttttcaaggttctttttaaaggactatcctgtgtatgtatgggaacatccaaatggaatattagtaacaggttatccaaaggacaaatacactaaatttaaccttacttatacgattaaggaaatagaacaatttcctatgttaataataggtatgtttctggttaatgcaatagttacttttttaatagctctattcataggtttaaaaatggtgaaatctataaaaccaattattactggcataaagcttatgtcaaaaggagaaccagtacttttacaagaaaaaggaatactaagtgatatttcaaaatctattaatactgtatctaaagagttgcaaatgaaagatgaaaaacttaggaagaaagaggaagctaggtctaactggattgcaggaatatctcatgatataagaactccactttcaatgataattggatatgctggagaacttgaagaaagcagtagcctttcaaatagagaacaagagcaagtgtctattatatgcaatcaaggggttaaaatcagagaattagtaaatgacctaaatttagtatctaaacttgaatataatatgcaagcattgaattgtgataagattagagtttctgcgtttttgagagagcttatttctgagtttataaataataatttggataatgacttttatgttgaacttgatatactaaatgaagatattattatagatgcagataaaaaattattaaaaagggctattagtaatttaatacaaaatagtataactcataaccaacaaggatgtaatataagggttacctctaagtctgatttagatttttgctatataattgttgaagatgatggaaaaggtatgagtcaagaaagaattaatagtttattaaagagccaaaatggactaagtgaggcatatgccaaaggtcaaaatcatggtctaggtattttgatagtagctggaattattaatgcacatagaggtaaattagatattatgagtattgatagtcagggactaaaaacaatactaaaattacctctaattaagtgatattttataaaataataacagataagaatgaagaatgaagaatgaaaatattttgaaaataattttattctttattgacaaaataactctattagagtagaataaggataaattcttttcttgtcaagttttattaaagtaaagagtaacttgtgctttatgcgcttatggctgagttactcatggtatcaaaattttcatagaaataatattttggaattattgtaaggttattaaattctttagataattccattttttttattttttagttaatatttaattttattattgacaaaaaaattctactaaaatagaattatggtatagtgttttttaattttaagaaaaaatataatgacatcctaaaaaagttttaattatacgttgttctgtgtagttataatagcttctatgtaactattgtaagtatattttattataattatttatttaaagtacgataaatgttttaaattgaagtattttgcaccattgagttctactaaagtagagtttttgtgtagtatttttagaaataacatatatatatatgtatttatgttgaaatatatgggaaatttataatataattaatgaaaaaatttaaattttgtaatatataaataaaaaaactctaaaatagaaggatataattatatagaatgtttcaattaaacaaggcaaaaactataatcttaaaattaaaattaacattattcttaagaagtaagaaatttaagaagtaaaaagtttagtgataagtggtagtaagcaagaaatttagaaagtaggaagtttagtgataagtggtagtaagcgagaaatttagaaagtgggaagtttagtaataatttgtagcaagtaagaaatttaggaagtaggaagtttagtaataatttgtagcaagtaagaaatttagggagtaggaagtttagtagtaataatttgtagcaagtaagaaatttagggagtaggaagtttagtaataatttgtagtaagtaagaaatttagaaagtaggaaatttagtaataatttatagtaagtaagaaatttagaaagtaggaagtttagtaataatttatagcaagtaagaaatttagaaagtaggaagtttagtagtaatttatagtaagtaagaaatttagtaagtgagaagtttagttataatttatagtaagtaagaaatttagtaagtgagaagttcagtaataagttgtagtaaatgaaaagtttaggaagtaggaagttcagtaataagttgtagtaaataaaaaatttaggaagtaggatttactgaaatacaaatatttaaaatcaaagagtttaaaagaaaggagagctactggacaagtatccaaaatagatagctgagtacaaaatatctcataaaattaagcaatataatacaagagaattttgacattatttatatatatttaccgtgtacaaatagctaaatttaggattaagattgaaaaatatcttataagtctgagcttatataaatccgtataagatgtatttaatcgaaaaattttattatggatattgcttgtctatattctgagtagcaaggttttatcatgactataaaaaagttgccacaatcagaattaaagataatgaaatttatatggaaatcagattccaaagtaacatctagagatattgttttaggaatggagcaaaaatatcaatggaaacaaacgacaactttgactcttttatctagattagtagtaaaaagatttctaaattctcaaaagatagataaatatacacattatgaagttttaattaaagaaaaggaatacataggagttgagacaagagatttttttagaaatattcatgattcttctataaaaagtttattgttgtcattacatgaaaatattaatttgagcaaagatgatatcttacttattgaagagtggataaaaaatctaaaagaagaggagaaagacgtataagcaaacgtatttcttatagcattaatataaagtgtatgtaagtgtatttatgtaatatattagtctacttaagtaatatgacaaatgattataagtggattatgatactataatgtgaatctaaataaattaaatataaattgatagtggatattctatttaattaaatttaaaaagctacctttacttataagtataattaaggtagctttttaaatagaggtagtgtgattaaagagaatttttaaatataaattgtgaagctttaatatagatgacaatatatattttgcaaatatgacacagtgttttcgtatttaagatgataaaataaataggaattaatgaagatatttaaaaaataaaaataaagaattaatagaagatattaaagagatagagataaaagtgttaatagaagatattgaaaaagtaaaaataaaggattaatagaagatactgaagaggtagaaacaaaagtgttaatagaagatattgaaaaaataaaaacaaaagattaataaaaggtactgaagagatagagataaaagtgttaatagaagatattgaaaaataaaaataaaagattgatataatatactgaagaggtagaaacaaaagtgttaatagaagatactaaaaaagtaaaaataaaggactaataaaaggtactgaagagatagagaaaaaaatgttaatagaagatactgaaaaaatagaaataaaaaattaggaggaaaatttatgaaatatcaggtttcattattagcagtgaaggatattgaagtatcaaaaaaattttacaaagaattatttgagcaagaaattgaattggacttaggcaaaaatgtaacatttaaaggaggatttgctatacaagaagacttcgcatggcttacagggattaatccagatacaattatacaaaaatcaaataatatggaactttattttgaggttgatgattttgacgaatttattgaaaaactcaattattataaagatgtagagtttgtccataagccactaaaacatgaatggcaacaaagagtagtgcgtatttatgacccagataagcatattattgagataggagagtctatggaagttatagctagaagatatttatctgagggatactctgtagaagaaacttctaaaataattcaacatccaattgaatttgtaaagcagtgtgaaaatagtaaggaatgattgtttaaattataattatttagtagaaattaattgtagtggaactaattcaagataatatataggactagtatttgacaaatgtcataaattaaattaaaataaagaaaatattaataaagaaaaataaggggaatattaataaagaaaaaataaatataatattaaaatatattaataaatttgaatatttataatatttttaatttgaagtaggaatacttaaacgtataaagtttattatcggaaatttctatattaatatgtagtaattcaatattattataaaggagtggttattattaaggcaattgaactttataaaaaattagatttagaatttaatattaaaaatattaatgatgattggagttttatgaattttgaaaatgattttatcactccagaatttagaaaaaagtacatatgattagtattagataatgctcaaaatattaataaagtatacacaactacttttcctgataaagaaataattaagcaagttatagataaagatgaaaaagatattttaattttttcacatcacgcaatgggatacatagcatcagatgaaggttttccatttcacgacataccactatcttatatggaagagatgaaaaatcgtagaatttctttttatgtattacattctccactagacaactatagtgactattcaacttctgttagttttgcaaaagctatgggtttagaaatagtcaaaccattttgtaaatatgacgataaaattgaggtaggagttatatgtaaaacatcactaaaatcaatagaagagattaaggaattaattaaaaaatctgttggtcatgatgtgaaattgtatgattatggagattctgtattaaaagatggtttagttgctattgcagcagggggaggaagttatccatttgtagcaagagaagttgctgaacttggtataaatctatatattactgggtttactaagcctttaaaacattttgaaccagtattagagttccatcaaatagcaaaagataatttaattaatgttataggtgctactcattattctacagaaaaatttgcgtgtatgggcatggttgattattttaaaaatctaggtttagaatcagagtttttgcaaggaaaatattacttagaggatttataggacatattaaacaataaaaataaacagttagtaaaaatttattttactaactgtttatttttttacctatttatccagtgttttgaaaaaatctatctttattttttaaactaagaaaatagacttttaattgttgattagaagatttagttttgatgtcttttaaattatttttcgatattttttagtttattttttgatgtattttagattattatttaggattgattagaatttataaatatttattttagattattgtaaatatttatttaaaaaaaatagaattattatatttatgataataaatggtataataaaaggtaaagtgtcaaatatgcactaaattaaataagttaattagtatataggttaaagtggaagtaattaaaacttattaagtattagaaaatgacttcttattagagtaagtatctaaaatgatataaaaattatgattactcattaaagtgactattatagagtagataaaattgcccataaaaatagctataatagagtggataagattactcattaaagcaattactatagagtagataaaattactcactaaaataactataatagagtggataagattattcattaaagcgattactgtggagtagataaaattactcactaaaataactataatagagtagataagatactcattaaggtgattattgtagagtagataaaattacccatcaaagttaattatcacatattagataagattattcattaaagttactatcacagagtggataaaattacacattaaaattgtctgttaaagaatgaataaaaaagagattgctcaatataagaagcatataaaaaatcaaacatataaaatttaataaataataactgatagggaaaggaaagatagaatgatatttacaaaaagcaataaatacgataaggactttctcatgaaaaatatgatgggacctaattgtataaaaatattggaagaattaacaagtaagataaaactagaaaagggaatgcgtattttagacttaggttgtggtaagggtatatcttcgatatttttagcaaaggaatttgatgctactgtatttgcaacagatttatggatagaaccaactgaaaactataaaagatttaaagagtttaaattggatgataaaatatttccaatacaggcagaggcacatgaactaccttatgcagaaggtttctttgatgcggtgataagtatcgattcttatcactattttggaaacaaagaaggatttttagacaatcatatatcacctcttgtaaaagaggggggaatacttgctatggcaatgcctggattaaaagaagattttgtggattgtataccagatgaactcattccattttggcaagataatatgaacttccattcaattacatggtggaataaactttggtctgaatcggagtctgtgattgtagagaaatgtgaagctttaaattgtcatgatgaagcttggaaggattggataaattgtgataattcatatgctataaatgacaaaaaaatgatggaagtagagaatggaaagtattttaatacaatttctttgatagcgagaactaaataattgtgatgaatttataaaagtataagataagtagaaatataagttgaatgagagtataagaagcatagaaatataagttgaattaaagtagaaggtaaataaaaatgtaagttaaataaagagtttatacaaaaatgattttttagattatttatacccaatcgagttgcttaggtcagttgggtatttttatttttttaaagttaaattgcaaatactattgtgtgatatatattttaatactaaatgtttgttttataagaaataaactaatagaaaaaatagttttaacaatgaaagcaaaaaaggtattgatgaagattaaaaattttatagtaccattttatatatttttttatatattttattatactttaaatcaaatttcaaaatgattaagtatatatacccaaaagattaaagaactatatttattatactattaaaaattattttaatagagatacaagagatagatatattggttttaattttatagaaatatacaaagatattttaagctaatatatagtaatttatatagcattataaactagaatcatataaaataagttaactacaatcataaattaaaaaggagaaatgttaagttgatagaaggaataaaatttataaaggcagaagaaaagtatatttattcgtattggcaaacttttgataaaatagcaaaagagaggaaatatctagctatggatgaagcctttccttttgaagaaacagttgaatttataaaaaatactataaataaaaacttaccacaactgtttataattgatttagaatcagataactgtattggttggtgtgacgttttacctaaaactgaaaaagttggttatttaggcatgggtattcttaaagagtatagggaaaaaggtatcggaagtagtcttttaaaacaaattattgatttatcaaaagaatatgggtatgaaaaaattgagcttgatgtatttaaaagtaatagtagagctattcatgtttataaatctttagggtttgtagaggtaaatacaatatctagtggttttacatggaatgatagacctgtaaaagaagaagtaattcaaatggagcttacacttatataaaataaagttaaagtctttaaaattccatatacacttgtataaaataaagttaaagcccttaaaattccatataaaagaaatatttttaagggctttttaataatggttcttttgaaggtagctaaatatctaaaattttatatattaaatttaaagaaaatataaagatggaagatacaaccatgtttactaataaaaaaattaaagtcataaataataaactcataaacaacttattattacttatgtttattttgcatctattacttcatgagccattttaactaagtcattcatagataaatttgagtcttgaactgtaaaagaatagtaaactccatcttgtttccatgtcaaaaacttaaattcattaacttcaactttgtctgattcattatttggccctacactaaatgtgtatttgcctgatttttcatcaattttatcctgttctgtcattttataaccttctggtacaaacttttgtgcgaatgcttcataagaaatattaatatctttgtaagtatctacaacttttagattgtcagaactcttctcaagtacattatttgctgtgtcaagagatatttcatcattgccatttttatattcaaaactaagtgcttttgattttcctaaaacattattttctttgtcaagtgcttttttatttacagtatatgctcctttaaatttatatccattactaaattcagaaactatattaggggtaaagttaaagtctttttttacttgttctgtagttgggatagatgtataggtagccttagtacttgattttccaactaaactatatatatgtcctactgcaagggctgttgtgctcaatatcaaagtaatggctaaagttgcaactaagccttttctaaatggtaatttgtgtgttttattattaatcattttataattttcctctctttctggtaaactatttagtgttttacttaaactattatgaaaactttctggaacttctggaaacgaattatttaatatatttttattcatatgattacctccgtgttttctaatttagtttttaataatgttcttcctcttgataatctactttttacagttccttgaggtatatctaatatttccttaacctcatctactgaataaccttcaatatagtaaaggactattggaattttaatttttttaggtagactttgaatagcagtatacaaatcgctatagtcatctttttcatcaatttttttgtttttgaagacatcttcaaatgatagagattttaatcgtttgcgtcttaatgaattacattcatttatgactattctaatcagccatgttttaaagtattgttcttccttaagagaatccaacttttcatatgcttttaaaatagcattgttgacggcatcttcacagtcttggtcgtttcctagaatagacttagatactcgatacaaagtctgttctgattcaagtatattgtttgtaaatgtagttttatccaactgagttccttcccttctatgcaaatcgtagcgctacttttttgcctttcacttattagataaaattttactatagatggttcactttttttatgattatttgataaatttaagtttgaaagttttgcctattctatacaaatattctataatatatttttttctagtattttcccctcatatataaagccatgtagatatattaaactttagaagccatttatatatttagttttatagtaagtgtttatattaagtaattataaaatagtaagtatttgatgttgagtagttagaaaataatgcttttggattatttacttcatgtatagatttaaaataagttttttaattaatgactaaagataacggtattttgactaaaagtaggcttttaagaaaaaacaatgaaacttaaatgagaatcaagagttagaaatgtcattattttagatagatatgaacataaataaacttaaaaaatataaattataaaaataataatttttttaaaataacaaagttttttgattaaaagttttatattgaaatgtcaaagtaataaaataccttataagttaattacaggttaaaaaaataatatgtgaattttctgatatttactaattatcaataaagtatttaagtattaatgtttttagtgagactttaagacagataatctcctattaaagatactatatcttagataaaataaattaaaacaatataaaaacataacaagattacagaaagaaagctcataataaaacactaaaaaatttattttaaggaggaataaagtatgaagtttcaagaaatgattaatagcccaggtctttggattgtttctagttttttagtaattatttcagttgttcaagcaatcgtatttatgaaatcagcacttaaagaggcttcaaatcttggtattgaaagaaaaggaattaaagcagcaattcgctcagctagtgttacagcaattggaccctctctatctcctgttattacattattatcactggtagctgtgattggtgctcctacgacttggatgaggctttgtgatgtaggagctgccagaacagaacttggagtaatatctcttacatcaaatttatctggagtagaagtaggtagtgctgcatttggagcagaagctttttcgtatgcactatggggaatggctttaaataacttaggttggttgcttgttgtatttattttgggtcatagaatgcgtggaattgttgaaaaaatgaatgtgaaatataatcctacttgggttaaaaaactacttgcaggggctacagttggattatttgcttaccttctttcaaatcaaataaaaacattcgaaataccaaaacttacaccagcagttatttcagctatagttatgctagtattgacgactttatttaaaaagaatcaacgattacaagaattatccttaggtattgccatgttgattggtatgtttggcacacagattgtactatcatgattaaaacagataagaggtgataattatgtatgataaaaagatgataaaaatagggagaatttctataggtcttgcaattattgcaaattttattcctgcaatctatgtaggtcttcgctttggtcagatgccaatgctttctgttatattccaaatttggggattagttgctacaacttatggagtgagttggattgttcaacctatagcttattatccaacactaggagctccaggttcttatataggttggcttgcaggttctgttggagatatacgtatgcctgcagcatcaatggcacagaaaattgcaggtgtagaagcaggaactcatgagggtgaagttgtaggaacaattggtacatgttgttcaatctttgtatcagcttctatgattactatttttaccattgtaggctataaagtaattcctttgttacctgaatttattactgattcatttaattatatacttccagcattgtttggggcaatttacgttgatattgcgcgtaaagatattcgagctggtggatgtacgattgctgtagcattagctattatgtactttggtgaaaaaattggtataccaggtggattgttgacattgtttattgtgttaggtgggatacttattacaagggttttctttgtaattgatagcaataaaacgaaagaataggattgtttactaggaagaaagactagaattatttgctgagaaaaagaataggattgtttactaggaggaaagactagaattatttgctgagaaaaagaataggattgtttactaggaggaaagactagaattatttgttgagaaaaaagaataggattgtttattaagaaatatgaatataaataagtcttgaaaggagaagaagaatgtttgatgttaaaattgccaatggaataatcattgatggtacaggaaattcaagatataaaggtgatgtagggattgtaggagacaaaatcatggctattggagatctaagtcaaaaagaggctaaagagactatagacgcaactggaaaatttgtatcacctggttttatagatttccacactcattctgatttatctcttgtgtatgacaaatacacaagaagccgtatccatacaggtgtaacaacagacgttattgcaaactgtggtataggagttgctccgataagagaagagaagaagcaggagttaattgactatcttggaacgaggataattggtacaattccaataaaattgaaccttcactggaatacaatgcaggaatactttgattacttaactgaaaattctccagcagtaaatgttgtagcttatgtagcacaaggacctgtacgtatcaatgaaatgggattttcaaaggagccagctactttagagcaacttaaaaatatgaagttggaagttagaaaggctatggaagctggatgtgtagctctttcgtcaggattagtttatttaccaggagcatatacaaagaaagaagaaatggctgaattatgtaaggaattgataccatacaatggatactatatatctcatattagagatgagggtgatgaagaaatggaagctcttgatgaagcaatttatatagctaagacggcaggagttcctctacatatttctcatttaaaagtcatgggtcataagaattttggaactattgataaggtatttaaaaagctagatgaagctgaggcagatggcttggaagttacttttgattgttacccatatacagctggaatgacatctttgggtgcacttttacctccttgggcttttgaaggtggtgtagaaaacatggtaaaacgattagaagtgcaagaaaatagggacagaattataaaagagctagaggaagggattcctggatggcaatgtttctaccagttagcaggtggttgggacggtgttgtactagcctctgtaatgactgaagcaaataaatatgtagagggtaaaactttaatggaggtagctaaaatcaatggtgaaaatccatttgatacgttctttaggcttttgattgaagaaaaaagtaaaattcaagtagttgttcatacacaaggtcaagaggatacagataaggtcgtttgccatccaaagtcatgtataggttctgatagtatggacctttctacagaaggcttactttctcttggaaagcctcatccccgtgcatttggtacttttggacgaattttctcttactatgttagagaaaaaggtatgttgacttttgaggaagcagttaaaaagataacttatctttcagcaaaacgcttaggaatttataaagaaaggggtctacttaaggaaaattattttgctgacattgtggtatttgacccagatacaatagaagataaagcgacttatagtaatcctaaacagtatacagtgggagtggaatatgtattggtaaatggtaaaattgcattggcaggaggaaagcaaactgatgtatgtgctggacgtgtaattaaaaatcctcttagcatagcaaaatagaatacattaagaacttttataaaaatagtctttctttgaatattaaggaaggctatttttgttaaattaataaagattactctacttgtgttttctagagaatttaactttaagtagaaaaaacaatatattaattgtaaaatgtaattaatattaatggataagatttaaatacaaaaacttaaatacaaaaatgttttaacagatagtcataattaaaaaacttaaagtaactttttatataagatataattgattatgcaaaattttatgaagcagcaaccttgttactttaagtcaagggaggttcagaaagtgtcttaagagataatagtatctttaggaaaggagaaacgaaatgaaaatactttatgtaggaccaggcatggtaatcgacaaaatactagcagtaagtaaaaagaattttcccaatattgaagcagattttcttagatatgatagatatattgaagtacctgatttattggaaaaatatagaggtagagtagatgcagttctttttacaggtaaatcgccatttaaattttttgaaaaaagacaaaaagattttgtgttgtctgattatattcctagacatgaaacaacattatacagagtattgcttgaaattacatatttgcttaaattcgatattagtagacttagtatagatacttatgataaagctatgctgaagagattgtataaagaaattggagttgaatttaaggatgaacatatgttttttgcagagcaaaagtatttagaagaggactacataaagtttgtgcttgaatttcataaatataattatcaaaataatgacatatgttgttgtattacaggtcttgaagaagcatatcatgcaatgaaaaaagagaatattccagtagttttagccttgccttctgaggatgtaatggtacaaagtataaaaaacattcagatgcgttatattgcaaagaaaaacaatgagaatcagattgttgttcttgctatcaaacttaatatgccttcagaatattcactgatgaaggaagatgagtacgcttatctttcacaaaggattaagattcttgataaactataccatttcaatagccgtatagatggtgttttggtagagcagagtagaagcgaatttatgatttttacaactaaaaaaatacttgagttagaaacaaagaagtacagagatatttatttgttggatatgattcgtgaagtttcagttataaacacttatataggaattggttatggaaaaacagcaaatgaagctaaatttaacgcttatgagagtattaagatggctcaaagtcaaaaaaatgatgcagcatatgtagtttttgaaaatggagaaattatgggaccactaaagccaaatcctgctgtcaaagagaaaaatagctttgatgaacgattttatcaaattgctacagagacagggctaagtgctaatactgtatataaagtgttcaataaaataataaatagtggaaaaactgaatttacatcaaaggaattagctattatatgtggtgtaagtattagaactatggacaggattatacttagattgtgtgattctggttattgtgaggtagtgagtgaacagcttatgagcaagtatggtagacccagtagaatattacgttttaaaccttttctgttgttttaaatagatataagttaaaaattaaatttttatgataacattttctttacaattttttagatatatgttaatatttagaaaaatgcatatgtattcataaaataaactcaaaatagctaaaaaatcattaaaaaggaaatcgtatgcataaaatgagaaagttaatttataacttaaataaatctgggaggagataattatgggaaaatatcaggattcaaaaaaagttgtaagaaattattttgaagcattagaaaatgctactggggatgaggttgaaaatgtcttaaagcaacatatgaaatcagattataactggaaaggtgtgtatccatttcgtgaacaagaaggcactgaaaatgtagcagatgtattttggaagcctttaaaaaaatcattgagtaatatgcaaagacgacaagatattttcattgcaggaacaaatgagattgacaatagtgaatgggtaatgagtatggggcattttatgggactttttgataaggattggcttggcattaaacatactcgtaaaatgattagtttaagatatgcagaatttaactgtgttcaagatggtaaaattgctaaaactggattatttgtagatataattgggtttatgattcaagcaggagttaatccattgccaccacaaacaggttcatattttgtatatccagggccaattgaccataatggattactttttgaagatgcagatgaagttgaaggagtaaaaactttagcattagtaaataaaatggtagatgatttatctgaattaaatgaaagtggtactatgggatgcccaccagaaatacttaaaaaatcttgggctaaagatatgatttggtatggtccaggtggaattggtgcttcttatactatacctagatatcaagagcaacaccagctaccatttagaaataatttaaaaggaaagactttcaatgggcatgtatgtagatttgcagaaggtaattttgcttgtttctttggatggcctaatctgactaatgtaccatgtggaggttttttaggattaccaggtggagaggttaaagcagatatgcaagttgttgatgtttattatcgtaagggcgataaacttcaagaaaactgggtgttaattgatattccttattggttgaaacaacaagggcttgatattcttgagagaactaaaagtatttttaatgcttagttatgcatacgtattctaaaacaaagggggatataaagtggcatctaccaacaaaaataatgtaacaagtaaagaggaagaaaaagaagtttctacaagtgggcttgaatcatgtacggttaaagaaaacaaagctaaaatgaatcaaactaattttagtaatataaatgaaaatcaaacaaatgagaataaaacgaacacatataaaggaaatatagataaaataaacacaaataaatccgacataaataaagttaacatagatacagtggatacagataaattaaatacaaatactcttactgaaaaaaataaaaaagttatatttaagggggaagataatatgtcatctacaaaaatttactatggagattcattagaagtaacgcctgttggagtaatggattacaatgatttttcaaaacagacaaaaagggaacaggaaatacctggatttgattctaagtatagagattttgtagattatattatgaagattacacataatatctgggaagaaaaaggtataggtgttatttatgatacatatcacaataatgttacaatgcattgtggctcttcaaatttagttggtattaaagatgttatttccaatactcttcaaacattacatgcgtttcctgatagaagattaattggtcaaaatgtaatatggtctaactttggtgctgatggttttttatcttctcaccgtgttttgtctacagcaactaacttaggtgatagtaattttggaccagcaacaggtagaaaaataaactttagaactgtaattgattgtgccacaactaacaatagaatccacgaagaatggttggttagagataatttatggattgttactcaattaggattaaaccctcaggaagtagcaaagagtatggcaaaggcaagtgaatctaaagtgcttagcttacaatcaacttatggtatctgtgaatctatggatggtcaatttatgccaactaagtatcaagcaaaagatgattctgttggcgaaatgatgcttgaaatgacaagccgtatttataattataaatatataaatgaagttaaaaaatactatcatgataatgcagtagtacattttatatgtgataaagatttaaatggttatgatgagattcaaggaatgattgtaagtttacttgcatcaattccaaatggaagttatgaagtggaaagagtaacttgtaatcaaagagaaaaaaatgaaggttatgatgtatctataagatggagattacgtggaataaatgaaggtataggattttttggacagccttctggaaagcatatagaagtaatgggaatcaatcattatcatatacttcaaggtaaagtaaaggaagagtggataacttttgatggtatggatgtattaaaacaaatgtatatgggagtagaagaataaagctgtttagagtataaataattttgaaatgtatatagggaagtattgctttataaaatttaagtggggaatgtatatgaaaaatagatgtttaaacttttagcaaaaattatgactaaatttaaaagggggaattataaaaatatgaaaacaacggttgaaatagaaaatgatatcatattaggaaaagactattcaaacctaaaaagaggaattgcatttttttcaattgctttaatatactttttttattgctacaattttatggtgggtacttttattaaaccaacaatgatttatgctttagcagatgggggatttggcttttcattaaaacaaacagaagaaatatttgcagttatgtcttttggtacaattccaggtacatttatttttggggtgatttctacaaaaattgggaagaagaggactttaattagcgttgctttactgattggattgacaacatttataccaatgttatctcctacagatattatgttatggaaaatagcacgtttgtgtacaggagtagtgttgggaggcgtatttggaacagctatgcctttagttgcagatatgtttccaagtaaatatcgtggtaagttagctgctatattaactgctttattttcattagcaatgatttttggtgggaaagtatatggcgttttaggtgatgcaaattggcaaatattgatgtatactgcgattataccacctatagttggagctatcttagcaatcttctttgtgccagatgatttggagtatacaaaggaattagttaaaaagggaaaagaaactggtgaaaagattagctatataagtatgtataagggaaaatacttatggattggattgggaacgattcttttatcaggtgcaaattttacagcatattcagcattttcaaataatgcaactacatacctagtgacaggaataggaatgtcagcagcagtggctgggtctatatatagtttacaaggaattggtcaattagtaggatatttattctggggttcaattgcagataaatttggaagaaaaataccttttataggtatggcattagcagcagtatttgtttttatatatacaaaattaggtggagataatacaacaacattctatatgatatcagtattactaggtgttgctgttggatattctggagcatggggagcatactacacagagttgtttccaagtaaatatcgttcgttgtcatctggtatgtcatttaatggaggaaggattatatctacgtttgcaatacctgctatagctggtacagcttctggtactttaggtatgatgactatcttttacatatcaatcgcagtctttgtagcaggtgctattgtatggttattcttaccagagacgttaaataataaaaaataaaatactaggaatttattttgttacttagaaaggggtggcttatgatttcatcaattgatgtatgtattataataggatatttgctattaatgttagttattggttattattcaggaaaagataataaaaatcaagaagattatttcttggcaggtaggtcaatgccatggattccaattgctttatcagttgcagctactatgattagtgcaaatggctttataggtggtcctggatgggcatatgtagatggaatgtatccagtaatgtaaaatgtgcaaaaaattcttttgtagttagtgcatttgttatgaatttagtttactactttatgctattggtaggagtaattttatttgttttttatgggggaaggacatttgaaacttcaaatgaaataatgattacttttattttaaatgaacttccagtaggagccattggaattattattgcaggtgtgtttgcagcagcaatgtctagtatcgactctatattaaacagtatgacaactgtttttacgaaggatatttatgagttttatttcaaaaaagacaacaaagaatcatcattaaaagttacaatgattataactgtagttataggagttgttatgacaggttttattattatgggatttggaggaagcatcaaatcaattcttgaccttgttggtaactatatctcatactttgctggaccagctacaggtgcatttgtactagcaatgtttacatataaagctaatgataaaggagtatctattggttttattgtagggttagttttaggattttttatttctaataaatataatgtgagttggttgtggaatccagcaataggtgctacaataacattgatatttggatatatttttagtgtcattttaaagaaaaatcataaagtagatgatattaaaaaatacactgcatttggtatgagaaatcaccttatttctcaaggaatggataaagtagatggagtatctatagtgccattttctttaggtaaacaagaactaattgtattagctttttttattatccaatatattatattatttttgatacaattttaagaagaaatactagatatttaaggagaaatactaaatgaatcaaaagaaagttcattataataaatcggctacatcaaaagatgtcgcaagattggcaggagtatctcaatcatctgtttcaagagcatttggtagtgcaaatggaaagggcgtaaaacctgaagtaagagaaagaatttttcgtgtagcaaacgaaatagggtatgttcctaatttggtagcacggggaatgattagtggaaaaactaatgttataggtttgatagttggtgatagtctaggtccattttacaatagaattatcaatttatttgtagaaaaaattcaagagataggtaaacagtgtctcgtttttaaagttcctagacaacaaagtatagatagtataatttcaaaagtaattcagtttcaagtagaagctgtgattattacagcttcggccatgaataaggtgatggctgagacttgtgaagaaaacaatattcctgtgattctttttaatcgttttatacctggtataaaaataagtacagtctatgtagacccaattgaaggtgggggcatggttgctgaatatctgcttaagaaaggtcataagaatataggatatattcaatttacgagagaaacaagtgaagaaatggaaaagaaaattggattttattctaagttaagacaaagtgggattcataaccttaaagaagaatctgcaaactatgattatgattctggatatgaagcaggtaagagaatgttagcattatcaaatcctccaacagcaattttttgcacaagtgacttgatagctattggtgtaatggatgctgcaaggtttgagtacaagttgagggtgccagaggatttatcagtgataggatatgatgatattcaaatggcttcatggaagagttataatttaacgacgattagacaaccactagatttgttgattgaaaaaacaattaacatacttaagtccttattaaatgaagaaaatccagagtcagtcgttgaaatgttaaaacctgaattgattgaaagaggttctacactttaagtgatagatatttaattaagtggtagatatttaattaagtggtagatatttaattaagtggtagatatttaattaagtggtagatatttaattaagtggtagatatttaattaagtggtagatatttaattaagtggtagatatttaattaagtggtagatatttaattaagtggtagatatttaattaagtggtagatatttaattaagtggtagatatttaatcaagtgatagatacctaattaagttgtagatatctgataagaaatttttaagttttcaatcgttctaaattgtgagtataaaaatctactaaatttagttatgtaaaatataaattataagtgtagaaactaggctactagcttttataccacttcaaacattactggaagtagttaagtttacagcagtttagttttatgtagatataatattctgtaaatagacaaaattaaaatatgtaattaaaatatgtaagtgtctcaaaatgaaatttttaatttatgaggcacttttttgtataaaatcaaatatatttttataactttaacaataaaaagaggcttatctctattttgagacagcctcaaatttttaaaactatattagtttacagcttcttttcctatcaaatcttttaactcttcatgagtcatagtttctttttcaaataagaatttagaaacagaatgtaaatcttcaagattatcctttaacatctctaaagtctctttataacaaatttcaactatacgatttgcttccttttgaaccttatcacataagaaagtcttatcatttccatcaatagtcataaatcctaagttactcataccatattcacaaaccatttggttagctatttcagtgactttctttaagtcgtcctttgcaccagtagatttatgattaaatattaattcttctgaagcctttccagcaagtaatatttttatttttccaatcaactcatccttagtataaatatatctatcttcatcaggtaattgaagaacataacctaatgcttgtcctctaggaactatagatattttttgtataggacaaattcctactatatcacttacaagagcatgtccagcttcatgatatgctactatttttttctctttttcaaccaatgcagagtttttagattctagccctgcaataactctttcaagtgccttgtcaaaatgttctgatgtaatacactcactgtcatctctaactgcaaatatagctgcttcatttgctatatttgaaagatgagccccattgaaaccatgagtttttttagctaaaagttctagatttacagatttgtctataggtttgtcatctgtatgtacctttagaatttcaaatctagtgtgatagtttggtgcacctatatgaatgtgtctgtcaaatcttcctggtctaagtaaagcttcatctaataagtcaagtctattggtagcacctattattaatacattggaatctttattaaatccatccatttcaactaaaagttggtttagtgtttggtctttttcgttgttactttcaagatgtctctttgctcctacagcatctatttcgtctataaatattatacttggagcttcttttctagctttttcaaatagagttctaactctttttgctcccacacctacatatttttcaacgaactctgaaccagtaacattgaaaaatgatgagtttgtttcaccagctacagcagatgcaagtagggttttacctgttcctggaggaccataaaataatactcctttaggtatttttgcacccattttttgatatttttgtggtgacttcataaaatcgactatttcaaatagttcttcttttacttcgtctaatccagcaacgtctctaaatgtagtctttggttttgtagaaagtgaatcatctgtttgattatctctttccatttttgtctgtgcaaagacaggagctggattgttgattttcttaaaaaagttgtttagcattttcatattcacacctcaggtaattaattattgttaatcaattttatattttccatatttactattttttattatttatttttcatggaaaaaatatacatgttatctaaataaaaataaatttgtaagatgtatgaaaaaatgaatttatgtatatagagatttctacttatgtattgaataaagtattacaaattataaattatgtattgattatatattgagtaaagtattataaagcatgtattgattaagtatttattaagtattgaataaaatattacaaatttagttgaaatgaaaatgataaaaaatgttgtgctatattttacaaatcatataaatagagaaattgttgtagcacaaagtaataggtagtatattagaatataatataggatttgttgtgtagtatagtagcatattagaatataatataggatttgttatgtagtatagtagcatattagaatataatataggatttgttatgtatatagtagcatattagaatataatgtaggatttgttatgtagaatatatagagtcatgtagaatataaatatataaaaggattttgggtataaatttaaaaattaatagcaaaatgagtagtatagacatataattagtagtaggaagtaattaaatttttcctaaacaaaaaaaatagttgcaaataatttgattaagtgatatagtaaataaggtaagaataaaacaaagaagaagtccgcttctcaccttacgccggaggttagtaaggtaaatataagttaaagcttaattttaatttaagtttgtttaaatttggtaacttatattgcggatgattacgtcatccgctttttattttataaaaattttggaggtgtcctacaattagcaaagaattagcaatcaatgaacaaataaaagataaggaaataagagtcctttcaccaacaggtgaacaacttggagtaatgcctactaaagaagctcaagcaatggctaatagcaaaaacttagatttggttcaaatctcgccgaatgcgaatccaccagtatgtaagataatggattatggaaagtttagatatgagcaagcgagaaaagagaaagaagctaagaaaaaacaaaaaactatagttgtaaaagaagtaagacttagaccaggtattgaacaaaatgatttaaatacgaaagctaataatgctataaagttccttaaaaaaggggataaagtcaaagttgaacttagatttagaggaagagaattaggacataaagacataggtaaagaagttatgcttaagtttttagatataataaaagagtttggagaaccaacaaaagcccctgcatttgagggtaataatatggttgtaattatagatccaaaaaaatagatgattaactgagaggaggaatttgtcatgcctaaaatgaaaactcatagaggtgcagcaaagagattaaagaaaacaggaactggaaagttaaagagagctaaagcttttaaaaaacatatattaactaaaaaatctgcaaaaactaaaatgaacttaagaaaatcaactttagtaagtgatggagatgccaagagaatagcacaattattaccatactaagatacagattgtaaataataactatagaagagggatataaaaggaggtcataacgatggcaagagttaaaaaagctatgaacgctcgtaaaaagcataagaaaatattaaaacttgcaaaaggattcagaggatctagaagcaaattatatagaccagcaaatacattcgtaatgaaagcattaaaaaatgcttatataggaagaaagttaaagaagagagacttcagaaaactttggatacaaagaataaatgcagctgctagaatgaatggaatatcttattcaagattaatgaatggattaaaattatctggtattgaagttaacagaaaaatgttatctgaaatggctatacaagacccagaaggatttgcaaaattagcagaagttgctaaagcaaaattagcttagtattgaatcatgagatgtaaagtctttgagttatataaataattcaaggacttttttattttttgaaaaatacttattagtgtcatgtacaaccaattttataatgataaataaaataagcaatacaatagaattttatgagatttattataagaattgttacaattatttatcatagctataaaaagtcatagtaaaaatgatattgatgtatgtttatatatgtataaagctttcaatcaatcttgaattaatattatcaacatgataatattatcttattaataatataaataagggggagataatatgaatgagaaactaatggattgttttgtaaacccaattaaatgcaagttattgcttgaagttttttcaaataatcgaactacagctaaacaattaggagaaaaatttcaagatatatcaaaggcaacactttatcgttaccttaataaaatgttgaaagatgatattataaaagtggttgaagaaaataaaataaggggaactgttgaaaaagtatatgctatgaagttagatatagctgatgatgtgaacaaaattatagatgagaactctggagaagaatatgctcaactgtttactcaatatatgatgggatttttaagagaattttatgaatacgctgaaagaaaggaaaaggatatcctaaaagagggttcaggattttctgtctgtccagtatatgctagtattgatgaaatagttgaagtgagtaaaaaaattgctagtatactagaacctctaagaaataactcgcacgaagaaggcagaagaatgcattctataggagtgataatcactccacctaaagaggatgaagggaaataaatctgatttacatgaggtagagccaatttacacggaaaatcgttttatgatttacatatgtatccagagcaaagtatctctgcatggattgtacttcattgtaccatttcatccaatgacttggagtggaacaatgaagttttttaatttttcatattaatgcctaaagaaatgaactttagaccacatatgcaattaggctacattatacaattagaccagatatacagaataaaaattagtatttttatagcagataaattgactgttattcttcttaaaaatcatctattagttattgttagcatattgaaagaaattatagtaatccattgaataaatgaatattgcccataatcatataaactgctatagtttaaaataaagcaggacgttaaattttatagtaatcttaaaatttaagagggggattttatgaaaataaaatttgttattatgccattggtgatatttttaatagtattatttgtggggtgtcaaagtacaaaagatacagaagttaaagcaaaagatacagaaattaaaatattaggtacaggtgatttgcattcaattttgacagactctatggtttcatatgtaaatgaggaaagggaaaagaataaaaatctgcttatggtagatgcgggagatttctatggtacacaaagtagagaaatgtgggaatggtcttctggaaaaaagttaattaatattaaaagaaatggtagagcagagtatgatgacataattaaaagtagtaaagatgaagtacctatagttaaagatatggcaaagttgaaatatgatgctgtagttttgggagataatgaatttatttcaaatgataagcaaagtcttgataaactagtttctgattttaaaaataataatatgccattggtatcagcaaatatatatgaacaatctggagaaaattatgtacaaccatatgtaatgaaaaatattaagacagatgagggcaatgtaaaagttggaatactaggtcttactataaaagaagtaggggaaacccttggtcttgaggattttgaaaaggataaaaaagctagagagcttggagaacaagctgattacaaaggaaaattatatgcaaatgatttagtagaagatgcaaagaaatggataaaagttatggaaaaagaaagtccagacataatagttgcagttgtacactcaggggaagaacctaaaacagatagaaatccaggaaatagaataaaagagttagcaactacagtggatggaatagatgcaattgtagctggtcatactcatgaaaaaatagatgaacacaaatataaaaataaatctggagatgaagtaattgttacacaaccaggttggcatggagatagagtatcagagattaatttcaaattaaataaagagaatggaaagtgggacataaaggaaaagtctagtaaattaaaaataattgataaagaagtaagtatagttgctactgcagatttacattcacatttctctgataaattaacagttgaccttgttaatgaacgtagtaacccaattgaacctgttgtagtagatgcaggcgacttcttagaccctcaaacagatgaaatgactcaatggtataaagagtggaaaagtataagagataataatagtgataaaacgattagtagatgcccaatggtcatggatatgaatcagggaatgtatgatgcagtagtacttggaaatcatgaatttgtatctgaaaaagatgaattttggtcagatgaacgccttttagatgctgttatagaggattttgaacaggtggcaatttctgtgttatcagcaaatatatataggcaatctggtaaaaattatgttaaaccatatattataaaagatgtggagacgagtgaaggtaatgtaaaagtaggaatattgggacttactataaaagaagtaggtaaaggtcttaaaaatgtaaacttacaagagcaatttcaatataaggataaattgtatgcaaatgatttagtggaagatgcaaagaaatgggtaaaagttatgaaaaagaaaaaaccagatataatagttgcagttgtacattcaggagaagaaccaaaaaatccaaaacacccaggaaatagaataaaagagctagcaactacagtagatggtattgatgcaattgttgctagtcatactcatgaaaaaatagatgagcatgaatataaaaataagtctggagaaaaagttatagtgacacaaccaggtgagcatggtaaatattattctaaaattacctttaaagtaaataaagaaaagggttcgtggattattaatgataaattcagtaaaacaattgaggttgaataactttataaaatttatagataaagtaaattatctgatattgacatgatatataagataaagtttctaatattagtataatgcataatgtgaaatattttaataataagagaataaacaagacaaataaaaatattttaacatgtaagatatagtatgaactattatactaatgcttactttataatttgaacatgttagaataagtcttatttgaaaattttagtgtattagagtaagtattattttaccagtaaaaaatattgagaactatatgtagatttgcttaaaaaggaatttacatatagttcttttcgtataataaatagtacaatcttatatggtaaagataaagtgtgatattaaattttattatcatccaaaatctaaggaggagtctcttatgaaaataaaatttattatagtagcatcaataatatttttaatagtattacttgtggggtgtcaaagtactaaagacacagaaatcaatgtactcgccacaagtgatttacattcaattattccagataatttaatttcctatgtagaagaggagagaaaatatgatgagaatctacttatggtagatgcaggagatttttttgacatgcaaagtggtgagatgaataagtggtttactggtcaaaaattagtaagatttaaagatgggataccagagtacaaaaaaatagctgaaccacgtgaaggagaagttccattggctaaaaaaatggcaaagctgaagtatgatgcagttacatttgggaatcatgaatttgtatctaatgacaagcagagccttgataaattggtttctgattttaaaaataacaatataccattagtatcagcaaacgtatatgaacaatctggagaaaactacgtaaagccatatgtaatgaaaaatataaatactgacaagggaactgtaaaggttggtatacttggtctgactataaaagaagtaggggaacgttcaaggtttaaaagttttaaacaagataaaaaggctagagaacttggggaacaacctcaatacaaagggaaattatatgcaaatgatttagtagaagatgcaaataagtgggtaaaggttatggaaaaaaaagaaaagccagatataatagttgccattgtacattcaggtgaagagccaaaaaatcctaaaaatccaggaaatagaataaaagaactagcaacaactgtagagggaatagatgctattgtagcaggtcatacacatgaaaaaatagaacagcatacatataaaaataattctggtgaagaagtaatagtaacacagcctggagctcatggtaatagtatatcaaagattaattttaagttggataagaagaatgataagtggtttataaaagacaaatatagtgaattaaaggtttttggaaaggaagtaaatataattacaacttctggtctgaatccaaaattttcagatgaaatggcagttaatttgtttaatgaaagagatagagatgttcaacctatctttatagatactggagattttttaaatactaatacaaaagaaatgactaagtgggctaaagagtggcaatacaatgaaaataaaggcatctataaaaaaataaatgaatggccaattgtatatcttggttatgatgctgtagtacttggtagccatgaatttacagaggataaagagacttttgagggaaaaaaatctacattggattatattatagaaaactttgaagaaatgaagataccagtattatcagctaatatatatgatgaatctggagaaaattatgtaaaaccttatataattcataatgtagaaactagggaaggaaatataaaggttggagtattaggtcttactactactgataaggatgaagaagacttaagtagctcaagcttaagcaaagactcaaagacttcgaaaattcctgaagaaacaggaaagttatatactaataatctagtaaaagatgcaagcgaatgggtaaaagttatgcaaaaggaaagtcctgatgtgattgttgcagttgtacattcagataataatagtactctaaaaaatccaagtagtgaagtcaaaaaacttgcaatgtcagtagatggaatagatgctattgttgtaggtcatacgaaaaataaggtagaagaacatatttacaaaaataagtctggagatgaggttatagtaacacaatctggagaagattgttattcaaaaataagtcttgaactaagaaaagaaaatggcaagtggaatatcataaacaaatatagtaaagcaataaaaatgaagtgaatttattgatatataaaccattattaacactgatttttataatataataaatactgattctacaatataattaacactacttttttaaatataataaatactgattctacaatattattaatactactttttataatataatcaatactactttttacaatataatcaatactgattctataatataattaacactactttttaaatataatcaatactgattctataatattaacactattttttatgctatataacaattattgaaaatgatataaatataatatctcaaatgatatgaatataacatctgaatagagggtgttttatttgtaaaaaataagtttacagtttgagcgtataaacttatggtaaaggagaataattatgaattataagaagattgcaattataacgggtgctaatagtggttttggtaaagagtttctaaagttattaataaatgaagaagaaataacagaaatatgggcagttgcaagaaacaaggcgagattaaatcaattagtagatgaatttggaagtaaggtaaaagttttttcaaaagatttatcaaaaatagaagaagtaaaagaaattggtacatttttaagtaaagaaaatgtatgtataaaataccttataaacaatgctggttttgcaaaattctgttcatacaatgatttaagtatagatgaatctattaatatgattgatttaaatattagtgctgttgtagtattgggacttatatgtattccatatatgcaaaagggaagccatattatgaatatttcttcacaagcatcattccagccattgccatatcaaaatatttatagttcaactaaagcgtttataagaaattatacaagagcattaaatgttgaacttaagagtaaagggataaatgcaattgctgtatgtccaggttggatgagtacaaatctatttaagagaggtatagttgtagctgaaaaagggacaaaaaatttcccaggcatagtgtctccagacgttgttgccaaaaaagcattgaaggatgcaaagaaaaataaggatatttctgtgtatggtataaatacaaaatccagtcatttattagcaaaactattgccacaaaaaatgatgatgaaggtttggttaatgcaacaacatattaaggaataagagtttcggtaattaagtatcagttggagattcaatctattatatattataagaagttttgttgagcaaataataattgtgacaaaacggcttatctagtgccgataagccgtctataatgtataaaaaatatatttttgattttactttatttagatattgaagtattaaaatatgtaggacttgaaattttataaagataaatactatgatattttgtaaaaactgagatatgttgatattacatagtttaactatactgttaaattgaagttttcttattttgcattatgcttattacttaatgatttagactataatttccataccatcatatgcaaaataaatgttatcaagtttcttttctaattcactgtaataaccatatgattttccccacatttcgtcaatatgtgtaatgataatctttttaattctataatagtttttaatttcaacaatctcatctaaagtaaatatttcatctttaaatggtgtgtcttcaagttttgtaccatcatttaatataccatcatcagaaactagacttattattaaaacatcagcatcaaagtacatatcactatgagtaaatggcttgggattacagcaggcatatatgacttttttttcattctctttgataacatagaaggttatattcctgtctgggttattgttaatcaaatcaatatcaaaattatttatctttacatgcgaagtttcattaatagaaatgcaatttataacatcaccataatatttaagacaatcgagattcgttcggtttatatcttcaattacttcaggaagagcataaaagccaattggattattttctcctgtgataaagtcacatcctattttttcgacaattctaatacccttaacatggtctgggtcatggtgagaaattgaaatatgttttacttccgatattttttgtctgttacaagctactgtaatatcttcaggtgtgtctatcagcatttttatatcatcaatatataaacttggtcctaatcgttcatatcttccgcctttttgcctggcttcttcacatattttgcatttacaaaatgaacttggaataattgacataccgccactaccaacaatttttaatttcaaagttattacaccaccttctaaaaatattagattatataaataatctacaatcacaactgattaacaaaattatgagttaataaattatatcacatgtaaatatgaaagaatagtatgaaatttttataagattatattaaatatttctcaatgaaattgactttgtatatgagccgaatgactttattcaatatagataagacatttttcttgtaataagatatgattattctataaggttcatgtaattttgatataaaatattgattaataacatatatgttattggtgaacatatttctatagaatggaatatataattttttatatttatcattgtattattatacaaagaaagttaaaaagagtagagtacaaaggaattatttgtactttactctttgttttgttaaaaactaatttatattagtgattcaaatatttaactagagtataagggttgtatataatcttataagtaatttatctgacaaattaagataatatcctaatcaaattctagtcattcgaacataacatcacaagtgatttatctgacaaattaagataatatcctaattaaattgtagatatttatacataacactaaaagtaatttgtttaacaaattaagataatatcctaattaaattgtaggtatttatacataatactaaaagtaatttgtttaacaaattaaaatattatccaattaatataaaaattacttctttttaactgggaagcatacctctgttacccaattatcaggattactatcgttgccaggacttacatgataaatattaaacataggaccatccacatcatagttattatctgatatccaattaccaatagcctcacaagcgtctgcaacttgattgaaatttccattaacaattgcagttgcagcagtcacacttggaacagtcttaaatttaacatgttcagtatctttatactttccagatacagcaacttgtacttcaacatctacagaatcttctttatatccagtatcataaaagactgctttagaatactttgggggttcaatttgaacattctggtcttttgtctctaaaaatgcttgatgccataacattccttcgtcttgataagttggtataacccttctaagtgtcatcatatattttggtgcaaaattctttatagttacatcataatttttcataatatcatttcctccaattcttttaatagtggtttctatttttaatagttttttctgtgtatcttctaattgttcttttacttgagaatggtggatatttagatattttataagactttctttatcgttatattctgtcaaaatttcttttatagaatacaagccaaagcccatatcttttagtgcatggattctatttgtagtagaaagttggtctgcactatagtatctatatccattagtgttattcgtatgagaaggagttaaaagtcctatttcatcataatgacgtaacatacgaatactaattttacttagctttgaaaaatcgcctatcttaaacatgtttttgtctcctttataaaggtacttttagcttaatattaatataaaccatatcataatgttagagtcaactaaaattataattaaattatattgacatatgatgaaaaaaatattatactgaacatgttcagaacctaaaatgttaattattttggaggtctattatgaaaagtaatgataaagatgctagagaacgtataattgaagttacattgaatcttttaaatgaagtagatgatattgaggagattacagttagaaaaattgctgagcgtgcaaatgttggagttggtttaataaattatcattttaaaacaaaggataatttgttgagtactgccataggagatgtgatgtcaaatataatagcagagctatatgacgatagtgtatatactctaagacctattgaagatttgaaaaatttattaaaaaaattgtgtgatactggattacattatgaaaaagtgcttccttttgtgttgaatcaatgtataaccaatggagatatgcaagcagaacttgatattgtccctatgcttcgtaaaatttttggaaataaaaaagatgaaatgagtctaagaatcattgccctgcaaattattttaccaatacagatttctgctttatctacagaatcatttcagttatacagtggtataaatataaagaataaatatgagcgagataaattcattgatattttaatagaaaatattattggagaggatgttgatgtaagatgaaaattataactattggttcaagtcttatcactgttttactttttctttcaactatggtttgtgggttctggattaagaataataaggtaacagatgcaagttctattaagttccatatgaatagtgctatttttacagggatatttttattgatttccacaatccttttaattatatatataaaaaaataataatattattaataaataaagtatcagaaattataaagacaagagtcttaaaaatttctgatactttaccacataattttattaaacattaattgtgtgtgaaaaaatatcacttatttcaatctaatactaaatcttaagagtgagtataaagtattagaaattaagaagcattttttagttcaagtggattatctataccaaaataatcatataaagtagagcttatttcctctaaatttccatcttggaaaggtaattgtaaatttaccttttctaccacatctttaaatccagcatcagtattttgatttaaaaaatccatatatacatcaacagcttttctgtaatcttcttgtgataattgccatatctgaagtgatacatcagatgcaagaccataactcaagtaataaaaaggaacttggaagttatgagatacaagtatccaaaaaggagcatttttttctctaagtatattattggaaactccatattcttcctctaaatcaaaaaacaatttattgatatcatttagactcatatatggattcttgtatataatttcttgaaattcatcataaagacaagcatcaataatagtatttaaaacaatcgataagtgttctttttttatagcttcagattgtttaccaaaaaaatcatcaaaatatttataaaatagaatttctaaagatgttgaatgaacttcacatacatctatacttggttgcatcttattatttaagttaatactgttgtagtaattataaaaatgaccaaactcatgagcaaaactagtaacacctaaaaaagaattgtcccatgtattaaacaagaaaggtgctttatatttatttatataagtagtatatcctccaggcgatttgttttttccagaagaataatcgtacaagtcatattttttcatatagtcgaagctctcttttagttttggagatatatcttcaagtactttatcaaacttcctaaatgagcgatttttatatactttaatataaatagaagaatcagatggtttagatgaaatctctctatataatggaactatgtaatcttttacatcttgtctaaattttttagcttcttcttgagaatagtctttgtttaggttcatataggcataatctatataattcttaaatccttgcttacttgctatttcagttcttgtctgtataagttctaagaatatgttaccaaatataggattgtatttttttaagtaatctgaataaattttcacatattcttcagggctaagatttggtcttgacaaggcttcttcaaagtctacctctataccatctattgatactgtagatttagctaataagtcttcatattttacaactaggtcttgctcttttttaagtaaatcttcaacttctttagaattaagttttccaatgttctttagataattaaatgtatcctttccaagttctttttctaattctttagagaatttagaagttacaaatctatcttgaaagtctttgtatgacatgtcaacatctactgatttactcataagatacttatattccttagagtaaaattcgtctgatgaatctatgttatttctaatttttgctatagtaagtgtactgtaaaaatcctgataaattttatcaacttcattaaataaatttaattgttccttagctgttttagctgttaaaagtttgtcgttacacttgttaatgttttcgcaaattgactgtatattaggacgcttatattccattttttcaaaaggaatagttcctctaacagaatctttttttgtatcattagtataatttcttatgtatgatgcaaatataataaaaactgcaattaaaattagaaaaacaaatattttcttcttggatttaaccataaaaatcctccaatcatggatatagttattaattattttactatattaaatataaaaaatgcatgttaagaaaatttaacataaagatatagataagattataaataatataaaaaatttaacttcaaaaaagtatatgaaatttatactggtaaaatgataaataaattttaagtacaaaatagtaaaagctatgatagttttagacccattatatgtaaaaaatatagatgtttttggtgcaatttaaattaaaagatatatataaaaatttaaaatattccaaacagaaattataaaaattactatcattgtctttatgcaatatttatactataatagaataataatttagaggaaagctctaaaaataaacaaattaagggtcttaacagtagtgattttatgttaaggaggtataaagaaagttgaaaacaatagttagaagacttattctctacgcagatggaatgcgtcctactcaaataatggtatctgggtttgctgcgattattgtaatcggagcattgttgttaacactcccgatagcgtcgcagagtggagagagtataggcttattaaatgctctatttacggctacttcagcggtttgtgttactggtctagttatggtagatacagcaacttattggagtttatttggacagatagttataataacattgatacaaattggtggtcttggatttatgaccgtagccacaatgttttcacttatggcacgaaaaaaaatacaactaagagaaagattattaatacaagagtcattaaatcaagctgatttatcgggacttgtaagacttacaagatttgtattaataataaccataacaatagagggaataggtgcactggttttatcaactgtctttattccacaatttggtttgtctaaagggatatggtatagtgtatttcacgcaatatcagcgttttgtaatgccggatttgacttgatgggcagtgtaagtggcccatttacatcgttaaattcttatgtaaacaactttacagtatcaatgactgtttgcgcacttatagtgcttggagggctaggattccctgttgtacttgatattgtaagaaaaagaagattttcaaaattaaatgtgcattctaaggttgtattgttttcaactgctacacttatttttgtgggtgcattatttatttttcttatagaatttaatcaaaaagctactatggcggacttgcctttaaagggaaaagtactatcagcaatatttcaatcagtaacagcaagaactgctggttttaatacacttgatttagctactttacgagaaagtagtgtatttgtaatgataattttgatgtttattggagcatcacctgcatcaactggtgggggtataaaaacaacaacactagctgttttaatcattacagttagaagttttctatcaggaaaatcagatatagaagcttttgaaagaagattagctccatcaactataaaaaaatctcttggtatatttgtaatcagtatatcagcagttatttttggaacattgattatttcaataactcagcctaattttacattagttcaatcagcttttgaggttacatcagcacttgctacagttggttcaagtttagctggaactccaaatttaaatgctttaggtaagattataataataatctttatgtttatgggtagagttggttctcttactttatttatggctatactttctggtggtagaagaaagagtcaaccaatcagatatgcagaaggtaaaattatggttggttaagttaccaaggagtaatataaatttataatggatttagagtagcactgtaaatctgttgataaaataaatgagcctagatgtaattatatgaagaaataaaatcaactaataaacaaaattaattaatgaaataaaaaaacagggaaataaaatacaaataaaaaggtaaatcaaaattaaattaatctgtgtatataaaattatatattgtgtataagttttgtatgtgtaaagtatataagttttgtatgtgtaaacaattaatttaagagatattatataaattgtgtattagggaggaagtttcgagatgaagcaatatatagtcattgggtgtgggagatttggaagttcagttgcgtctactatgcatcttttaggacatcaagtaatggcaatagacaaaaatgaagattcagttcaaagtatatctgacaaggtaacccattcacttatagtggatgttactgatgagcaagcgttaaggtcattaggtttaggtaactttgatgtagcagtagttgcaataggttctgatataagggcatctataatggcgactcttatagccaaagaaatgggtgtagagttgataatatgtaaggcaaaggatgaattacaagctaaagtgctttataaaattggcgcagatagagttgtatttccagaaagagatatgggagtaagagttgcacacaatttagtttcggataatatattagaccatattgaacttgacccagagtattcaattgttgaaatcgtaactccaaatagttgggttggcaagacacttatagagcttgaattaagagctagatatgagataactgtacttgctataaaaacaggtaaaaatataaatgttacaccttctccagatgaggaacttacagccggaagtatcctagttataatcggtcaaaatactagtataacagcgataacatctggaaataaggggataattagaagaagataatttactatttaatatatatttaattgcaatgaaagtaaagagtatcatataattatgaatagttatatgatactatttttatttaatcgaaggtagtatttatttgtaagattagataaagagaagttaaattaaaagtaaggaggctgtgctaatataaaaatttataagttattagcatttagataaaatgattacaaatataaacagtaaggataatgaaaagttaaagtatacaagagcactattaaaatcaaagaataggaataaagagtcaaagttcataatagaaggatacagaatagtaatgcttgcacttgaatgtatggcaaaccttgattatgtatttatcaatgaagaatttgaaaataagaaagaacatgtaaaactattagaagatttggataaaaaaaacacaaagatatacaagactactaataaaaactttaaagaattagtggatacagaaaatactcaaggaataataggtgtagtttcatttaagaaaaaaaaattaagtgaaagtataaataaaaaagataaatttgtattgattttagatagaatacaagacccaggaaatatggggactataataaggactgctgattctgctggagtagatgccataatagcactaaagggatgtgtcgatatatacaacccaaaagtaattaggtctactatgggttctatttttgatatgaatataattgatgcttcacaagatgaaactgtggacatgcttaaatcattggattttaatatagtttcaagttacttaaatacagaaaatttttatgacaaaatagattatggttcaaaagtagcattggtgataggaaacgaagcaaatggaataaatgaagaacttgtatcaaagtctgatattttggttaagatacctatatatggtaaagccgagtcgttaaatgctgcgataagctctgctatactgatgtatgaaataaaaaaatacttaatttaatgtattgtaataaatataatgtcatgttataatcttgaattaaatagtagagtatcaaaaatagtcaatatatattaaaaaaataattaaattaattatatattagatgtatatcatataaaaaatgattgagttgattatgtattagatatatattatataaaaaataattgagttaattatgcattagatgtatattatataaaaaataattgagttaattatgcattagatatatattatataaaaaataattaaattaattatgtattggatatatattaaaaatagtcacataatttgaatggaaatgatataatactaaaataaacaatataatattgtaaatgcaatgaaagaggaaagtattttgattaaacttagtaaagagataaacacctaggctgggagtgttttctaagaggtcatgagaagttccctctggagtaacagagctgaaattttacagtaggctttgacgtcaaaaacgcgttaagtttgttagaggtggtttgatgatttttaaattgttaaactactagggtggtaccgcgaaactatagcctttcgtccctagacagggattgaggggctttttttatacaaaaaaacgaaagggtgatatgtgtgcaagaaaaattacttgctttacgtgaagcagctttggctgaaataaaagaagcacaaagcatagaaagtgtagaaagtttaagagttaagtacttaggaaaaaaaggtgagataactgccatacttaaagaaatgggtaaattatctgctgaagaaagaccagtagttggtaaggttgccaatgaggtaagagaaaacattgaacttagcataaattctaaaaaagaagaaataaatgctattgaaaaagaaagaaaattaaaagaggaagtgatagatgttactcaaccaggaaaagttttaaaggttgggaagaagcatccaataactcaaattatagatgaagtaacagatatatttatcggaatgggattctctatagcagaagggccagaagttgagactgttgaaaacaactttgacgcattaaacgctcctaaagaccatccatcaagagatatgagcgatacattctatatcaatgatggggtattacttagaactcaaacatctccagttcaagtaagaactatgagaagtcaagagttaccaataaaagtaattgcaccaggtagatgttttaggtcagactcgccagatgctacacactcaccaatgttccatcagatagaagggcttgttgttggaaaagatgttactatggcagaatttaaaggaactatggatatcttcgttgaaaaattgtttggttctgatatcaaaactaagtttagacctcacaacttcccatttacagaaccaagtgcagaggttgatgttacttgtttcaaatgtggtggtaaaggttgcccaatgtgtaaatatgaaggttggatagaaatattaggttcaggtatggttcatccaaatgtgcttagaaattgtggaatagacccagaagtttacagtggatttgcatttggagttggggttgaaagacttgcaatgcttaaatacgaaatagatgatattagattattattcgaaaatgatatgagattcttaaatcaattttaattaggagggtatgtagatgttagtatctttaaaatggcttagagactatgttgatatagacatggatgtaaaagagttcgctgataaaatgacaatgacaggaactaaagttgaaacaatagattattatggtgaagaaatagaaaatatattggttggaaagattttagaaataaaacaacatccaaatgctgataagttggttgtaactaaagtagatattggagataaagttgttcaaatagttacaggagctacaaatatatcagaaggagattatattccagtagctgtaaatggttctaagttacctggaggagttgaaatcaaacagactgatttcagaggtgaattatcagatggtatgatgtgttcagcagctgaactaggtatagatgaacattacattgaggagtataaaagaggtggtatatatattttagaccacgaagattcttatgaattaggaaaagatataaaagatgttttaggattaaaagatgctttaatagattttgaattaacttcaaacagacctgattgtaaatgcatgatgggtatagctagagaagcagctgcaactataggaacaaaagtaaaatatcctgaaatcgaagtaaaagaaagtgacgaagagatagatttcaaagttgagatagataatccagatttatgtagaagatatgttgctagaatggttacagatgtaaaaatagaaccttctccatattggatgcaaagaagacttacagaagcaggagtaagacctataagtaacatagtcgatataacaaacttcgtaatgttagagcttggtcaaccacttcatgcttttgatataaatcaagtagagactggaagaatagtagtaagaaatgctaaagatggagagaaacttgtaacattagatgatgttgagagaacattagataaagatatgctagttataacaaatggagaaaaatcacttggtttagctggtgtaatgggtggtgctaactcagaaataacttctaatacgaagactgtactttttgaaagtgccaatttcaaaccagaaaacataagaatgacagctaaaaaagttggtattaggtcagaagcatcttcaagaaatgaaaaagacttagaccctaatcttgcagagatagcagcaaatagagctgcacaacttgttgaaatgttaggagcaggaaaagttttaaaaggtgttgtagatgtatatccaaataaaccagaacctaaaaaattggtagtaaatcctcaaagaattaaccacctattaggtgtagatgtaccaatggagcagtttgtaggaattttagaatcattagagtttaaatgtaatttggtagctaatgataaattagaaatagatgtaccaagctttagaacagatatggaacaagaagctgatgtatgggaagaaatagctagaatttatggatttgagaatataccttctgtacaattagaaggaaatacgacagcaggaattaaaacttcaaaacaaaaattcatggatgctttaaaagataattcaactgctgtaggattaaatgaaatattaacatattcatttgtaagccctaagggagtcgataagataagagtaccagaaggtaatgctaagagaaactttgttaaattacttaacccattaggagaagaaacttctgtaatgagaactactttaataccaaatatgttagatgttttatcaactaatgtatctcataaaatagaagaagtatctgcatttgagtgtggacatatattcatcccacaagattcagaattacctaaagaagaaaatagaatgtgtgtaggtatgtatggtaaagatgttgacttctttgcactaaaaggaactatagaaactatacttgtaaatgtcggatttaaaggttatgaaattgaacctcaagataataatactaccttccaccctggtagatgtgctaaaatagtgtataataataaatatgtaggtacattaggtgaattgcatccagatgttatagaaaactacaatctaggtcaaagagtttatgtcgctgaaatagatattgactttgtatttgataattctgatagaacaaagaattatgtgccattaccaaaatatccatctacatcaagagatatagctcttattgttaaagatgatgtatttgtaaaacaaatagaagatataataaaggaaaatggtcaaggattagtagaaagctacaagttatttgatgtttacaaaggttctcaaatagaagctggatacaagtcaattgcgtattcaataacttatagaagtaaagataaaactctaacagatgaagatgtagctaaggtgcatgataagatattaagtgaattaagcgaaaaattaaatgctaacttaagatcaaattaacaactaatgtcgggggaggttaggatgaacaaagtaatggttaaaatccatggcgctgaatatccaatggttggagacaaatcagagaagtttatgattagtattgctgattttgtagacaaagaaatggataaaataacacgtcaaaacccgaaattgagcttatcagttgctgcgatactaactgcattaaatatatcagaccttttatttgaatgttcagatgagaatgagaagttgattaaagctaatgaagaattgagtaagaaggttggagcatctaatgaagagcttcaattagaaatcaagtctttaaagcttacgatagcagaaaaagaagcagaaaatcgtgaagctgagactaagatgaaagagttaattgagattatagaaaataaaaagcaagaaatattcgaacttagtaatacgacagaaggttctagagcagagttagatgtttataaaaacaagattgaggagttaagtactcaacttgaagaagcaaatgaaagagctactatagctgaaaacttagcttctgagtttcaaaacaaagcttatgatttacagttaaaatgtacagggttaaataatgatgcaaaaaatgtggaataaactaaaagatttgctgtctcttgttttttgagacagcttcttttaatgtataaatataaatgctatataaatatagctaatgtttaaatgtaaataaatataaatgctatataaatatagataatgtttaaatgtaaataaatataaatgctatatagatatagataatgtttaaatataaataaatatgaatgatatataaatacaaataatgtataaatataaatgatgtataaatatagataatatttaaatataaataatttttttatatcaatgaaaaatagaatctaaaatgattttgattttgtatctatcattagaaagcgagaggtttatatatgacaagcaagagtcagatgtctgaatcattctttttatgttctttgttggcaataacaggaggatttttggatatttatacttatgtggtaagaggtaaagtctttgctaatgcacaaactggaaatatagttttatttgggcttaatatagcagaaggtaatgtaaaggaatcattttattatttgattcctattttggcatttatgttaggtgtatttatagccgagaagataagaaagtattttacaaataataagacaaagattcattggcgtcaggttatcattataattgaaatgattacaatacttattgtttcatttattcctagaggaagatttaatatgtttgtaaatgttgctatttcttttatttgttcaatgcaagtagagagttttagaaaagtaaatgggaatagttttgcaacgacaatgtgtactggaaatttaagaagtgctacagaaactttatttcattatatacatactaagaatatttttatgataaaaaagagtttacagtattatgctattattatattctttatatctggagctattttaggaactttttttacaaaaattttcgtggaaaaatcaatactaatatgtttttttattttggcagtggtctttggaattatgtttatcaataaagatgattcatttaatgaaaattaactttctgtaaatttacaaaaaaatgaagctgttatttgatatactttatatatagcaaatattgtatagattaattaaagaatttaaaatatagtaagcaatatataagttaatagaagtattttaagtatagtaagcagtgtataaattaattaaaatgtcttaagtatagtaggcaatatatagattaatagaagtatttcaagtatagtaaacagtgtacaaattaattaaaatgttttaaatttagtaagcagtatataaattaattgaagaatttaaaatacagtaatcaatatataagttaatagaaatatactaaatatagtaaataatgtatatgttaactcaaatggaccaaatataaataactaatatataaattaattgaagaatttaaaatatagtaagaaatatataaatttaatacaaatatttaagttatagatataattatattaacctaacaagtataaatagaggagaaaaatatgaaaaaaatagaattacttgcaccagtaggctcttttgattcattaaaagcagcagttcaaaacggagcaaatgctgtgtatttaggtggtaaagactttagtgctagagcatctgcaaataactttgatagaaatgagctgattgaggctgttaaatactctcatataaggggagtgcaagtctttgttactgtaaatacattgataaaacagtatgaaatagaagattttgtagagtatgtaaaatttttatacgatatagatattgatgctttaatagtacaggatataggaatggcaagacttataaaaaaactattacctgactttgaactacatgcaagcactcaaatggtagcacattccttagaagatgtaaaataccttcagagtgtagggtttgatagagttgttttagcaagagaattaaatgttgatgagataaaatggatttgtgaaaatacaactgtagatatagaagtttttgtacatggagctttatgtgtatgttactcgggtcaatgccttatgagtagtatgataggcaataggtctggaaatagaggtaggtgtgcacagccatgtagacaaaagtatgagttgatagatataaatacaggagaagtagtaaaaagtaatggagattatttgttgagtcctagagatttaagtactatagaagatttggataaaataattgaaacaggtgtattatctttaaaaattgaagggagaatgaaaaaaccagagtatgtagctactgtggtttcaggatatagagaagcgattaatgaatttgtagataagaaaaaaataagtatttctgaggaaataataaataatttgtataccatatttaatagaaagtttacaaaaggatatatattaggtgaagttggtaaggatataatgaactctaatagacctaataatcaagggctatatattggaaaagttttagattataatagaaagaacaaaagacttagagtaatgctagaaaatacgcttaagaaaggtgatggaattaacttaggtggaggtactattggaagaataataaaggatggagagataactacaatagcacataaaggggatttgatagaattagattttgttggagaagcaaagagaaatcagcttatatataagacttctgacagcgaattaatgaatagagtacaagctacatttcagcaagataaagagttcataaaaactaatatacgtgcaaaagtgagtattaaactaggtaaaaagccagagctttttataagtgatttttgtggaaataaatcggtggtagaaggagacaaaatagttgaaaaagctataaaggtggctttaagtaaagaaaaaatagaaacacaaattcaaaagcttggaaatacaccatataagttaaaagagatagaaattgacctggatgaaggtgtaagtatgcctataagtgtgttaaatcaaatgagaagggattgtattgagcttttagatgaagaaagaataaagataaaagatagaaaatttaagaagaatagattaaaataccaaccaaatagagtaaataaacagaaaaaacttgatacagttcctaagattagagttaaagttaagaacttggagcaattagaagcagtattaaattataatgtagatttaatctattatgaagatataaatacattatcaaaagctttacaaatggcctcaagtatttctatagattcaagtatttctatagattcaagtatttctatagattcaagtatttctatggatttagatacttcttcgtctttaggtattcctaaagaactaatgggttcaaatacaaataacatagatactttgtcaaatacaagtaaaatagatactttgaataagaaccactataatacagcagtcactgacaaaaaattaatctattcagcaccaaggattgttagaaataaagagtacaagcaatttgagatattggataatataaaaggaattaataaggttcaaattggtaactggggctctatggaatactttaagaaaaaagacttaaatatagattgctacttaaatgcattcaatagtgaaagtataaaccacttcaaagaagagggagcaagtacagtttgtttgtcacaagaactaaacttaaatgaaattaaacaaactttaaaatatacagatgtagaaattgaagcagtaatatatggatatgctcctatgatggttacagaatactgtcctatgggagtagttgttagagattgtaaaaaggacaagagagttgctaaatgtaaggaaagtagttatgctttaagagactttacggatgcaagttataggataacacaagatatattctgtagaagtacaatttacaattcgaaggttacttgtatgttggacaatctatatgagttagaggaaattggaatagatgtatttaggatagattttacagttgaagatagtgagatggttaaaaaggttattgaagctcacattgaggtattgagtaataattataaacttggaaaaaaggctacagatttgtataagaaattagatgaaattggaacagttgcaggacactactataaaggtgtagaatagatataacatgaaaaatatacatgaatatatataaagacttgaatttatgtgtattaatatataaaaatatcatatatgtgaaaaaacagggggattggtgaaaatgagagaagaagctttagaaattttatttaagtatttagaaactgatagaatgagaaaacattgttatgctgttgaagctgttatgagagaattagccaaaagactagagccagaaaaagaagaagagtgggcagtggcaggtcttttacatgatttggattcagatatagttggaagaaagccaggagaaatatgtgaaggacatgctacaacaacagtagaactgcttaaaaaagaaaacttcggtgacgaagaaatgtatagagcaatacttggtcatcatgatggaatgggagttacaagaactagcttaatggaaaaagcaatatatgcagcagaccctataactgggtttataactgctatagctttagtttatccagataaaaaacttactagtgtaaagactaagtctgttattaaaagaatgaaagaaacgagatttgcttcaaatgtaaatagagatgcaatgagaagtatagaagatatagggattccatttgatgaatttgcagaactttctcttaatgcaatgaagaatataagtgatgtgcttgaaagtgctgaaaataattaattgagaatataaagagaaagtaaggcgagatacatgaaacttacaactatttgttatatagaaaaagatgacaagactttgatgttgtacagaaataaaaagaaagatgatatacatgaaggtaagtatgtaggagttggaggaaagtttgagcaaggagagactccagaagaatgtgtaattagggaagtaaaggaagagactggtcttactcttaaatcattgtcatataaagggttgataacttttccaaaatttaaagatgaagaagattggtatatgtttttgtatttctcagatgagtttgaaggtgaattgtctgaaaaagatttaaatgattgtaaagaaggaaatttaatttgggttggtaatgataaaatattcgatttaaatatgtgggaaggtgacaggttgttcttaaattgggctaagactggaaatatctttagtgcaaagattgtatatgataatgggaaactaaaagattataatgtaagtttcttagattaattaagatatagtttttagattaattaaaatgtagtttaatgatatattttaagaatataatttaaagatattacttaaaaatgtaatttaaagttacatcaaattaaaatgtaacttacaggttatagcaaattaaatttattgatataatattaaaataaacaatagtagttgggaaaaggggctatctcagtgcataaagatagccttttttagtctgtctacttaacaaggacatatccaaaatagaggtaagccttttttattgttgaaatgataaatatccacttgatttcatacaataaagaatgtctcattaactaaaaagttcacttttagacatttacttcttttatcttttattttgaataaattctaatttaagttctaattttatgtatatttttctccattaaagtgtagttaaggctagtatattgttaaaaaaataaaaattgacttagacaactatttgttttatactaaagtaaattttttaaaaggaggaataatttggaatgatagacataaatttagaaaaatgtgtaggctgtgggatgtgtgaatcagactgtcttgtaaatgcaataaaagttaaggatgataaagcaaaggttaaaaatattctctgtattaactgtggtcactgtatggcaatttgcccaacagatgcaatagaaatgcaaggatttgataaaaatgaagtaatagaatacaatcgtgaaagttttgaattagaacccgaaaagttattgaattttattaaatttagaagaagtataagacaatataaagatatagaggtagaagaagaaaaaataaaaaacatagtggaagctggtagatacacaccaacaggtggtaatagacagcctataagatacatattagtaaaagaaaagctaaaagaagtgaaagaactggcaatacaaggtctttataatttggcattagatactgatgacaatgaccctgtacgttctatctataaaaatacatttaagaaaatgtacaaaagatataaagagaacggaaatgattctttattttatgatgccccactacttatgatagttgtaggtgatatgtctctaggtggaagtgcttatgtagatggaggattggctgcatctaatatggaacttatggcctattctcaaggattaggaatttgttataatggattttttgttatggcatcaaatgtagagccaaagataaaagaactgttaggaatgagcgagaacgaagcagttatcacttcatttatattgggttatccagatgtgaaatataaaagaactgtaaatagaaacactgctaaatttgaaatgagatagaacttaaacttcattacaacttgtaaaattatgggatatagagtaggtatttagcagggtaaatttgttgtaatagatatataaatgagttataatttaaatatattgtatatattaaggatatttaaatttctaagtagatttatatatccttttatatactaatctattttttcatgtctacaagtttatgcagtaatttatactgtaaatcttaactatatggaggattgtgtagtgaatttaaaaaaattacttttattaattattgtaattacatctatattcacttcttgcatattttcttttggtatcaatgctataggtaatgataatcgtaccattcgtgttgcttatcctattcaaaaaggtttaactgaaatagatgagcaaggtaactattttgggtatacatatgaatatttgctagaaattgcacagtatactggatggaattatgaatttgttcaagttcctggagagataaatgaatctattacaaaattaatgaagatgttagaaaatggtgaaattgatataatgggaggtatgttatacaatgagccaatgcaaaaaatatataattatgcgggaaacagttatggagtagcaaatacagtactacaagcattatatgaaaatacagatattgataacataatgagttcgcaagatgtgaaaaaaattcgtattgctgtaatagaaaattctgatactaggcttaaagaattagatgagtattgtaaaatgaatcttatgtcacctgaattggtatattgtaaaacaagtgacgagcaattagaagtactaaagagtggtaaagcagatgtacttcttaatgttagtatgaacccaatagaaggtgtgcgtactgtagcaaaattctcatcaaagccattttatttcattactccaaaaggcagtacagacttaactcaaaagcttaattcagcaattaataatattgaacagaaggacccatatttttcaactactttatatgagaaatactttacgccagagaataatcaaatgtttttatctgatgaagaaactaattacattaaagatacagaaaaattaaaagtaggagtacttttaaacaaaccaccgtttcaaaatgcagataaagatacaggagaattaagaggtatatcaattgatttgttaaatcatatatgtgataaaacaggtttggaatttgaacttgtgcctgtaaaatctcaagaagatttggaagatatggctaaaaaacatgaaattgatattgtagcaggaatgatttatgattatgagtactctcgtgaacataatatagctatgtctcggccttttctttctactcaatatactatgatgattaataataaattaaatgagaatagtctaaatggaaagcgtatagctctagccaaaggtattgattattatggtcagtttgaagaaaatatagtttggtatgataatttagaagagtgtatagaagctgttaataaaggctatgcagattacacttatggagaaggttattctatgcagtactatatgaatcaacctaagtataaaaatgtgcgcctagttcctcaaacttatgaagcaaagagtatttgttttggcataattaaaaaagataaacaagaattattgaatatatttaataaagctattataagtatttcatcagaaaaaatgcaatcaattgtctaccaaaatactacatatagacaagatttctcgttgctttatattatgcaacagaatccaattgagactatttttattgtagcaagtttattaatttgtattattggatttatggcatttggtttacatactcgtacaagtatgaacgaaaagatatctttggaactcaaaaaacatactcagttgtatgaaatgacaagtgaatacttttttgagtatgattataagcaagataaattgataatttctatgccagaaaagggtattgagacttattatggtttggataaaagtgataaggaaagtgaaaatggcaatatagaaaatgaaagagataaaataagaagagaatataataaaaagttttttgatgtaataaaatcacaagaaaatgggactactgaaatgtattctatcatgcttgatgatacttttcattggattagaattacttcaaaaataatttataatgatagaaaaataccaatgtatgtaattggtaaaatagctaatattgattctgaaaaagaggaaaagaatagattgttggataaagttcaaagggatagtttaacaaatatttataatgcagcatatattagaaaattaactacacaaaatttattaaatttatcaactgaaaaaaatggagctttattgattatagatattgattattttaagtcaattaatgatacttatggtcacctggtaggagataaagtactgattgatgttgcaaaggtacttgatgaaagttttgcaaaagatgatatagtaggtcgtttaggtggagatgaatttagtgtttatataaatgatataataaataaggaagaacttatcaataaatgtaatgatgtatacaatcatattcatctcattaagttgccaaatggagaaagtttatctattagtatgggggtagttataacaaagcgtggtcaagagtatgatgaactgtatcaaatagcagataatgctctttatgattctaagagacaaggaagaaatagatttaaaatagtataagaattaattttaaaacagaataaagtttaataatatttaaattacaataaagcctaatgatacatgttattatctatcattaggctttatttctataagttaatattgaaagtaaatattatactaacagtagtattaatttacagagttaattttatatagattacttaaaattaaaatctatttagaatcaaaacttaaatttaatattggttcatagattttaatatttcaataacataatcccaaacattagctacagaagggatactaacatgttcatttggagtatgaacatcaaacatatctggtcctatagagatagcttcagcatgaggaagtttatcaagtaataatccacactcaagaccagcatgtagagccataacagtaggaactttaccagttaatttctcataagtttcactgcatattttttctaattttgagccttttttaaattcccaagctgggtattgagctataaggtcgtaattagcacctaaagcttgagccaaaagtcttattctatcagcgatttcatctctaatagacataacagaacttctaacagaagttaaaaattcaatagtagattctttagtttcaattatagcgaagttagtagaactttcaactaatccttctatatcaagacttactgattgaactccatgaggagttaagcaagacatttgaacaactttttctttacaatctttagtaagaactttgtctacagaagtttcagctactgagtaagtcatgccagggtcagaagtagtaaactcatgtttaaatgcagttaaaatgtcatttatttgttttttagcagattcaacatcagctttattaacagctattacacatttagcttcacgaggtatagcattgtgcttagtaccaccatcaacagaagctaattcataatcaacattcaatacacttaatactctagctattgctttgttagcatttgctctttgtaaaacaatttccataccagagtgtccacctaatagtccagtaacctcaactaataatccttgtttgtcacctttaacttccttgtattcaacaggtaaactaacaacacaagttttaccaccagcacagctaactaataagtatccttcctcctcggagtccatatttaggatatattgacctttaattaagctagggtctagtgcatctgcaccattcataccatcttcttcattaacagtaactaaaacttctagtgcaggatgctctaaagtattatcttctaatatagccatacccatagcaacagctataccattgtcagctcctagagtagttccagtagcatatatcatgtcaccatcaattcttaattttatagggtctttaagaaaatcatgttcaacattcttttctttttcgcaaaccatatccatatgtccttgaagaactacacctggacaattttcatatccttttgtagcaggctttcttattattatgtttaagctttcatcctgaatagtttcaagacctaaatttttaccaaagctaagtaaaaaatcacttatgcctttttcatttccagaacctctaggaatttgagatattttctcaaagtttttaaaaacactttctggttttaatccttctaatacgtttcccatgactcatgttcctccttaatttatctatataagtagctatttttttataagctaaaataaactcctttaaaaatattaaagaagattttttaacagattatattacaaataaagcatgtttatgtataatatatagatagctacatacatagtataatacaaaatatgtgtaaaatatatctaaaagagaaaaaatataataattttagaaatgaaaaagaaataaaacttgcattttttattggaaatgcttgaaaacatacatttttaaaattaaataaaaaagttaaaatatcgaggatggtgaatatagaaaatgaatgagaaatcgttaagagttctagaatacaataaaataatagatttgttaaagaagaaagcctcatcttctttaggtctaaaatatatagaaaatttagtaccaaatactgattttgtagaagtgaaatctatgctagaagaaactagtgaagctcaatcaattattataaagagaggttcagtagggttggaaggtattcatgatatagaagataaggtaaagagagcttatataggtgcttctcttgacccaggaagtctgattatgatagcagataccttaagagtggctagaagattaagaaatagcttatctagtagtgatgaagaagattttaattatccaataatacaatctctatcaaattctctatatgtgtacaaggacatagaagaccagatatacaatgctataattagtgaagtagaaatatctgacaatgcttcaagtacacttagagatatcagaagaagaatagcccaaaaaaatcaatccattaggtcaaaattaaattcaataataagttcaactacttatcaaaagtacttacaagatgcaataatttctctaagaggtgatagatttgtagtacctgtaaaatctgaatataggtcgcaagtagctggtatagtgcatgaccagtcatcttctggtgcgacactttttatagagccaatgactatagtagagatgaacaatgaattgaggcagttgaaactaggagagcaagaggaaatagaaagaattttatcagagatttcagctatggttggagaagtgagcgaagatttaatctctaatcaagagatacttggaagattggactttgcattttcaaagggaaaactttctatacagatgagaggaatagaaccaactttaaatgaggataaatatttaaacataaaaaatggaagacatccactgctggataaaaagaaggtagtagcaaatacaatttatttaggaagagacttccatacattggtgataacaggtccaaacacaggtggtaagactgttacaataaaaactgtaggtctatttgcacttatgacacaaagtggacttcatatacctgctgattatggaagtagtatgtgtgtatatgataatgtatttgcagatataggagatgaacagagtattgaacagagtctatcaacattttcatctcatatgacgaatatagtatctatattacaaaacgtaacagcagactctttagttatatttgacgagttaggagcaggaacagaccctgttgaaggagctgcccttgcaatagcagtattagaagatataaattctgtaggagctaaatgtatagctaccactcactatagtgagcttaaaaattatgctcttactaaaccaggtgtagaaaatgcagcagttgaatttgatatagaaactttaagcccaacatataagttacttataggtgttcccggaaaatcaaatgcgtttgagatttctagaaaacttgggctaagtgattatgtgatttcacgtgctaaagaatatataaatacagaaaacatagctttagaagatgtgttacagaatgttgaaaagaatagaatcaaagcagtagaagatagagaagaagctgaaagattaaaagaagagattgaaaaactgaaagtagagtatgacgaaaaacttgaaaaattggtcagtcaaagagataagatgattgaaaaagctaaatcagaagcattttcaattataagacaagctaaagaagaagtagatattataataaaagaacttagaaatcttgaacaagaaagagcttcaaaagaaaagaatcgtaagatagaagaacttagaaaagaattgaccagctctatgggaagtcttcagccaacagtaaaaagtatgatagttccaaaggtatcaaataaggagataaaagacttaaagccaggtgaagaagttaaggtaataactttaaatcaaaatggtagtgtagtttcagtagataaaaagagaaaagaagcagtagtgcaaattggtataatgaagatgactctaccttttaaatctttacaaaaaacacgcaaagatgtttcaacaaatgtaactaaatcaacgagaaacattataaggtcaaaatctggtagtgtaaaaaatgaagttgaccttagagggttaaacctagaagaagctataatggaagtagaaaagtatcttgatgatgcatatgtggcaggtttagagtctgtaacagtaatacatggaataggcacaggagtattaaaagcagggctacaagacattttaagaagaaatagacatgtaaaatcacaacgaggtggtcaatatggagaaggtggagcaggagtaacaattgttaaattaaaataatttgtataagaatacattagtaatttgtataagaatatattaagaatttgtataggagcacatttttatgatattggtatctgcatgtttaataggaataaattgtaaatatagtggcgataataatgaaaatgaaaaagtcaaggaatatttaaaaggcaaagaatttacacttgtatgcccagagcagttaggtggtctatctacaccaagaccacctgctgagatagttgatggaaaagtaattactaaagataataaggatgtaacagaaaactttgtaagaggggctaatgaaactctaaaaatagcaaatttatatgtatgtagcgaagcaatactaaaagagggtagcccctcttgtggatgtaatctaatatatgatggtagtttttcaggtaaaaagataccagggaaaggtataacagcaaggctgttagaagaagaaggaataaaaattaagagtgaaaaagatttatagaaaatagataaaagagtaaaaaaagtatataaagctaatattgatgtataaaaatagataaaagagtaaaaaaagtatataaagctaatattgatgtataaaaatagataaaagagcaaaataaatgtatataaaattaatattgatgtatgaaaattgataaaagattaaaaaaagtatataaagtcaactggatagtacaagaaacaataaaatagaaaaaagtcttataaaaaatcaataatagtgtgattaaaaactgcaattatagtatttttaatatatacagaaaacataattattaaagtgttttacactgtaatgaaatacttgaaaaaacacgaaatttgatttaacataaagagataagcacaatataaaccaggaacaatgtagagaggagcaacagaatgcaagattttaaggtggcaatatcaaattgccttaaagaaaaaatagaagatttatcgaaagaagagatagaggcacttatagaagttccaccaaataaggatatgggggactatgcttttccatgctttaaattagccaaagtgtttagaaaagctccaaacatgatagcaagtgaattggcggaaagtatagaaccaagtggagagataacaaaagtaatacaattaggcggatatgtaaatttctttgtaaataaatctcaattagcagaaactgtaattaaaaaagttttagatgaaaaagaaaattacggacatagtgattttggaaaagataaaactgtaatagttgaatattcttctccaaatatagcaaaacctttccatatagggcacataagaactacagttataggtaatgctttatataagatatatgattcgcaaggatacaagactataagaataaatcatttaggtgactatggaactcagtttggtaagttaatagtggcctttaaaaagtggggagaaaaagaagtagtagagtctaatccaattccagaattactaaaattatacgtaagattccatgatgaagctgaacaacacccagaaatggaagatgaagcaagagcatggtttaataaattagaaaatggtgacgaagaagcacaagaattatggcaatggtttagaaatgagagtttaaaagagtttaacagagtgtataaacttttagatatagaatttgattctttagcaggagagagtttttattctgataaaatgaacagagttatcgaactattagaagagaaaaatcttttaaaagagtctaaaggagcaagaattgttgatttagaagagtataaaatgccaccagcacttattactaagaatgatggttcaacgttatatatgacaagagatttagctgctgcaatatatagaaaagagacttatgattttgacaagtgtatatatgtagttggttctcaacaaaacttacatttccaacaatggtttaaggtaattgagcttatgggatatgattgggcaaaagatttaattcatgttggatttggtatggttgcacttgaagaaggtactatgtcgactagaaaaggaagagtagtatttttagaagatgctttaaatcaagctatagataaaactaaggaaattatactagctaaaaatccaaatgctaaaaatgtggatgaaatatctaagcaagtaggtgttggggcagtagtattccaagagttatctaacagtagaattaaagactataccttctcttgggaaagaacgcttagttttgatggtgagactggaccatatgttcagtatacacatgctagatgctgtgcagttttaagaaaagcagaagtagaagtgacttctgatatagattatagtctattagctgatgaagatagtgcagaagttcttagagttatagaatcattcaataagaatattttacttgctctaaagaaaaatgagccacatatagtgactagatttatgttagatttagctcaagcgtttaataaattttatcatgacaatccaattttagtagaaaatttggaaataagaaaagcaagacttgcattagttttagcaacaaaacaaactttagaaaattctctgaaattgttgggaatgcacgctccggaaagaatgtagcatgataaaatgttgaaataaaaagaataaaattgaacttagtacgcaatttgtataactgtaaaatatagggatgtcgaaaactgatgctttacatataaaaaagtagtatcgtataataatatatagatagtagattacaatgatttttgtacactactatccccctatatatgacagcttcttaaacgggctgtctctttttttttaataacaatttatttacattcaatttttcagaaaggatatatttatgaatgacgaattactaaaaaaagtctacacatcttcttttagtagtgcaagtagggctcttaaagatttaactataataaatacaaaatccttaatagatgataaaacgcaaagatgtgtgtatatagacgaaaatagactgagagatgaacttatttactatagattttatggagaaaaaataggaaatatcaattttttaaatattttactaccactaattttatcaaatactaatattcaaaaaagcgaagatgaggttattaaactaataaaaaagtatgttatttattttaaaaaagaagaacttttatttgattatttattaggttctgtagtgtataattccattatgcacaatcttataaataatagtaaaatagagtatgtcgaattactacagagtattaaagacaagataataggattttctatagaattagacaaatcagatgttgtaaagtttcagatggcaaggattaaagcaatacaattaattgataagtacattgatttgaaatctgaagattatgatgaagaaagtattttattaaatgttttaaatgttctatatgatgtatatatggaagatagaactgtagaaaatgaaggaattaatagcataaaaaaatctatattatccattttgggtgaagatagtaaattaaatgaagataatatagattttattttttctatgtccgaatatgttgttaaattgagaaaatataaaattggagttaaggcatataataaaagcatagacccaagaagtcttataagacttgaagaaggtaatactataatagaccctatatttaatcaaataacagttatgtcgaaaacctttaatgataatatattaagcataaaaataaattctaaatcaggtatttatatattaaagtttaaaaaggtttaggttattagagtgtgctatttttttctagataatctaaaaaatctttttccttagtgtcagttaaaaaacataattcctttactatattattcctaaggtcaatgaaatcactaatttgagtattttcattagtgtattcaagagactttataataagtagtaaatctctttttgataaagagttgatagatactttttcaattaattccataaaaaacttcctttcctcacattacttgaaattaataaattaattatatagatattatttagactttacatatactattttaacctataaggggtacaaaaagacagtataatcttaaaaagaggtgagaaatatttgaaaattttattaacaacattaaattccaagtttattcatacaaatttggctataagatatctaaaagaatttgtaagagatttgatagaagttaatatgaaagaatacacgataaacaacgatttggactatattttaaaggatatatataaaaatgaatatgatataatattattctcaacatatatctggaatgtgggagatatagttaaactttgtgataatctaaaaaaaattagacctaatactaaaatagctttgggcggaccggaagtgagttatgatagttatgaggcaatgaaaaagtatgattttgtggattatatactttatggagagggagaattaatttttagagacttagtacttcacttgcaaggaaagatgaaaataaatgatgtaaatggacttgtatatagacaaggcaatgagataatagtgaataagcctatggaattacttcaagatttggatgagattcctagtccttatgaaaacttgaatccaaaagaatatgaaaatagaatagtgtattatgaatcatcaagaggttgtccttttaactgccagtactgtttatcatctactattccaggtctaaggtattttagtttagacaggataaagagtgatttaaaagctttaatagatgcaagagtatcacagataaagtttatagataggacattcaatgcaaatagaaaagtggctatggaaatcatggatttccttatgaaaaatgataatggatatacaacttatcattttgaagttacagcgtatttgatagatgataagatgcttgagtttttggctgattgtaaagaaggtctttttcaatttgaaataggggttcagtcaacgaatgaaaaaacacttgatgcagtaggtagaagggatgattttaaaaagttgtctcatgttgtacaaactgtagcatcttatagaaatatacatcagcacttagacttaattgcaggactgccttatgaagattataagagctttgaaaattcttttaatgatgtatttaatctaggtatagagcatctgcaattaggctttttaaagatgattaaagggacaggtatgagaaaagttgcagatgagcatggttttaaatataaggattatgctccatatgagtttttatacaataattatataagctatgaagaaactttgaagctaaaggatatagaagatatactggagagatactacaattctaaaaactttgtgttatctatgagatatattataggcagattttataaacaaagtccttttaaattctttgaggtttttgccaagtattttgatgaaaatggctactttgatttggcacaaggaaagaatcagttatataaaatattgatggatttctataatgaaaaaatcaacatagataatgatgtattcaatgatatattaaaatatgactatatatcactgggtaaaacatcaaatataccacagttttttaataagctagatgtggatgattttaagaatagatgccatgtatttttacaagataatgataacttatcaacatatttacctagttttgttgataaaccagctaaacatataataaaatatgttcattttgagccatttagatttaatgttgtggatttaaaaaatgatataaatacagaaataagagaagtagaaaatgtagtcttatttgagtatgatgataaaaaaatatttgagaaatctaaaactcataaagtagagatttaagtatttaggaggataaaatggattttaagatagaaaaatatttgctaaaaaaagcagaagaattagcttttataactataaaacatggtggagagtttaaattaaaaagctataaagtgccaaaaggcggattagatgtacctataaaaaatgaggtattagtaaaagggataaaagaaaagactgctcaagataagttaaattcaatgtctatagcagatgcaatgatatatataattggaatagatagtaagtttaaaaacaatgcagagtatgagaagtttttaaatgctttatcaaaagatattgatttggatttgaaatcgtatatgggatatatgtcgagaaaatactttgagattggtgaacatacagattctttaatatatataaaagcatttataacaatgtatccagatgatttagatgcaatgtataactatgcgattgtttgccaagagatagctaaacagtatcaaaaagatatggatgataaggcaatgaatgcattcttacttgaagccatggctaagcttgaaaaggtaattgatgttgatgagaattttgcattaggttattatcacttaggctaccattattataatcaaggtcaatatttaaagactaagctgacttgggaagaagcattaaggctagggttagatgctgatttagtagctgaggtacaagagaatctaggcaagatggactttaaagttcaatatgaagaaggatatacacttgtattccaaggtaagtttaaggaaggattagagaagttacttccattagaagaagaacatatggattggtggaacttgctgtttatgatagcacttggatataagggtatgggcgaaatagagcaggctaagatgtatcttgagaagatattgataataaagcctaatcaggtggatactatagtggaattggggctttgtgaggcttataagaataatttagataaagcaatagagtattttgaacaagcggctaagataaaggaagacccagaaatactttgcaatttaggaatggcttatttaaataatggtgatattgatgatgcaacttactatatagaaagagcttatgaattaaatccacaagatgaaattactattgcttgtctaagagaacttggaataaataagtaaggatattgttaggttgtatttaattttatcggttaagtggggctatctcaaaatagagataagcctcttttttgtatgaagagttccaggagttactattggagataatgcaattatcgctgctggagcagttgtaacaaaaaatactattgtaggtggtgttcctgcaaagcttttaagagctattgatgaaatcccagaataaaatattaaactgtcttttagtcatataaattctttataacataaaaaataaattgagaaaaggtatagcaaatatggtattatttagttaaatatatataagggaggggttacttttgataaaaaaattagatgatattttagaacaacttaagggaggagagaaaattgtactctctgtagcagcagctcatgataaagaagttttaatggcaataaaggatgctgtagaaagaaatataattactcctatattggttggaaatgaaggcaaaataagagaaatatcaaaagaaataggatttgatttaagtggtatcaaaatagtggataaggatgatatcaaagagtgtgcagaaatagcagttaaattagtatcaagtaaagaagccgactttgtaatgaaaggattattagatacatctgtcatattaaaagaagtgttaaataaagactatggtcttagaactgatagtttattaagtcatgttatggtatatgagttagaaaaataccataaattacttataactacagatggaggtatgaatatagctcctgattatgaacaaaaggcaaagatattaaaaaattctataaaagctgcaaaagctttaggaatggaaactgtaaaagttgcatgtttggcagctaaagagaaagtaaatcctaagatgcaagcaactgtagatgcagatatgttagcaaaagcttgtaaagaaggagaatttggtgaaaatgtaattgtagaaggtcctctggcttttgatttagctgtttcaaaagaagctagtgagataaaagggtttaaaagtgaagtatctggagatgtagatatcatattggttccaacaatagaggttggcaatggaatagggaaagcctttacatatatggcagactctaaatcagcaggtataattatgggtgcaaaagctcctatagttttagtgtcaagagctgattcacatgaatctaaattatattctattgcatatggggctattgtagctaaaaatatgaaataggataaatcgcttgaaataaatgaattaaagtagaaaaaatagtcaaaatgtctaaattaatgctgtattaaaaaagttttatataaaaaataattatagcttcaaatgaatatatacaaatgttcaatttgaagctataattaatattaaagtaggaaaaataaaaaaattcaaaaaaattagtccaaaaaatgctattctaagaagtttttactaattaagtttagggagtaaaaatctgtaataagtccaaacagtagtgaaagataataaatacacaaacaatctgcaataatataaaaatgactagaaaaatttcaaatttgatttaaaaaaatcaaaacataatttaattaaactgaagtatcaaaaaagtaggtttagatattaacaaatagccaaaaacaagcgataaaatcaacttaaattaagtgtagaaaataaaatttttatgtattatctaattttgttaaaaaaatatttaaatctaaagcaaagcactgaaaattagtatataatcaacttagaaagcatttattttattattttatgacatgaagtcagtcacctgggggattttaaaaatcaaaaaaaggggataggaatatggatgaaaaaatgttaacaattgatttaaacagccagaagatgatagctaaagctagagaagaaggcgtagaaacaatgtatgatagaaaagaaggctttaaggcacaatgtggttttggtcttcaaggtgtttgctgtagaatatgtggaatgggaccatgtagaataagccctaagactccaagggggttatgtggagcagatgagcatactatagtaggtagaaactttgcaagaatggttgctggtgggacagctgcccattcagaccatgctagagatatagcacatacattagcattagctgatccaaatggaaactataaaataagagacgaagctaagttaattactttagctaaagaatgggatgtagagacagaaggtagagatatctatgatgtagcacatgaagtggcagaaattgcattaatggaatttggaaaaccttttgggacattaagatttataaaaaatgcaccagaaccaagacaaaaaatatggaaagaatacgctatagagccaagagctatagatagagaaattgcaacaataatgcactctactcatataggatgtactggtgatatagatagtttaatacacatgagtcttagaacttctatggctgatggttggggtggttctatgataggtactcgtctaagcgatatcttatttggaactccagtgccaagaagaacagaggctaatttagcagtattagaagaaaataaagttaacataatattacatggacatgagccagcattatcagaaatgatagttttagcatcagaagagccagacttagtagctttagctaaagaagttggtgctgatggaataaacttagcaggtatgtgttgtacaggtaatgagattacaatgagacatggtgtaaaaatagcaggagacttccatcaacaagaacttgcaataataactggagcagttgaagctgtaatagttgacgttcaatgtatattccctgcattagctagagttgcagattgttaccatactaaatttgtaacaacttctccaaaagctaagataacaggttcaacttatattgaatttagagaagaacaagcacttgatgatgctaaagcaatagttaaagaagctattttaaactttaaaaatagagataaatcaaaagtacttatacctgaattaaaatcaggcgcaacagttgggtatagtgtagaagcagtagtaaatcaattagacagagttgtaaactctcatatagacccagcaggaacagttaagccattaacagactgtctaaaagctggagtattaagaggagcagctggtgtagttggatgtaacaatgctaaaggagtttcaaatgaggctcacgtaacaataatgaaagaattaatcaaaaacgacataatagtagttactacaggttgtggagcttcagcagcagctaagtttggtttaatggaatctgatgcggctgaaaaatatgcaggtaaaggtcttgcaactgtctgtaaattagtaggaatcccaccagtactacatatgggttcttgtgttgatataagtcgtatactagatttagttggagcagcagctaattacttagatatggatatgtgtgaccttccagttgtaggtatagctccagaatggatgtcagaaaaagcagttgctataggatgctatgttgtagcttctggtatagacacttatttaggaataatgcctccaatagctggttcttcaagagcagtggatatattaactagtgagttaaaagataaagttggagctacatttactgtaaatacaaatccaaaagagttagcagctacaataatagaagatatagagaaaaaacgtgttcactttgaagcattagttgaagaaaaaatggcagaaaaggctgaagcttaaaaaatagtgaagttatagaataaacgtttttataagaagtttctggttgagtaaagttgaataaagtcaaatattaaagtaaagaacatcgaaatataatgaatatactgaataaataaaatataaacaatattaaagaataataaaactatacatgctgctttgaaaagctagtagggtaaatttaattggttcctgtaaggactagctgtagtttatttttagtgtataaaaatatagagtataaaaaatatttaactgtaaaattaactactaaaaagcaaatagtaataaaaggtggtagggattatgaagatagcaataacaggtaaaggtggagtaggtaaaacgactttttcttcaatgctctctaggatgtttgctgaagacggatacagagttgttgctgttgatgccgaccctgatgctaatttagctttagcactaggttttccaaaagaagtatatgaatcaatagtacctatatcagaaatgaaaaaattagtttcagatagaacagctgcttctgtaggttcatttggaaaaatgtttaagatgaatcctaaagtagacgatatccctgaaaatttctgtaaagaatacaatggagtaagattacttacattgggaaccgtagattctggtggtactggatgtgtatgtccagagcatgttcttttgaagagactctgctcacatttaatactacaaaataaagatgtagtggttatggatatggaagcgggaattgaacacttaggaagaggaacagcccaaggtgtagatgcttttatagtagttgtagaaccaggagagagaagtctacagacttatagaaaagttaagaaacttggacatgatataggtgtaaataaagtatttgtagtaggaaataaaattagaaataaggaagatgaagaatttataatccaaaacttagaagatggagaatctttaggatttatttactataaccaagatgttattgattctgatagagctaatcaatctccatatgattctagtgaaacaacgaaagaacagattaaagcaataaaagataaattaatgtcacttaaggataaataaaatagatagaaattttgatttgggattttaagttggttaaaggttagacataggcaatagataggtaataagtaagtaattagataaataactagctattaagtttgaatattttaatagcttagtagctagtttttaagtaattttacatgtataattatcttataaaatataatttttacatattaatacaatttttacaaaaattatattttaaatctatttaggttgtgggaggagattcagttatgggatttaaatctgacattgaaatagctcaagaagctaagcctcaagatattagagaggttgcaaaaaaattaggactaggtgaagatgatgtagaactttatggtaaatacaaagcaaaagttgactacaatctactaaaaagagagactggtaaaaaagctaagttaatactaactacagctataaatccaactccagcaggtgaaggaaaaactactactactataggtgttgctgatgcatttgctaaactagacaaaaatgtattagttgctttaagagaaccatctctaggaccagtatttggtgttaaaggtggagcagctggtggaggatatgcacaagttgttcctatggaagatataaacttacacttcacaggagattttcacgctataggagctgctaacaatcttttagctgctatgcttgataaccatattcaccaaggaaatgcacttagaatagaccctaagaaaataacttggagaagatgtgtggacatgaacgatagacaacttagaaatatcgttgatggtatgggtaaaaaaggtgatggagcagttagacaagatggattcgatataactgttgcttctgaaataatggcagcgttctgtttggcaagtgatatatctgatttaaaagaaagattaggaaacataatagttggatacagctatgaaggtgaacctgtaacagctagacaattaaaagctaatggtgctatggctgcattattaaaagatgctttaaaaccaaacctagttcaaactcttgaaggaacaccatcatttgtacacggtggaccattcgcaaatatagctcatggatgtaactctgttatagctacaagaatggctatgcactttgcagactatgtaataactgaggctggtttcggtgctgaccttggagcagaaaaattcttagatataaaatgtagaatggcaaacttaaaaccagatgctgttataatagttgctactgtaagagcattaaaatacaatggtggagttgctaaagcagacttaaataacgaaaacctagaagctcttgaaaaaggacttccaaacttattaaaacatgttgaaaacataactcaagtatatggattaccagcagttgttgcaatcaatagattcccacttgatactgaagctgaacttaaacttgttgaagacaagtgtaaggaattaggtgttaatgttgctctttctgaagtatgggcaaaaggtggagaaggtggaattgcagtagctaaagaagttttaagattattggatgaagaagaaaataactttagattctgctatgaagatgatttatctataaaagacaagataaatgctatagctactaagatttatggagcagatggtgtagattatactcctgaagctgataaggaaatagctaacttagaaaaacttggatttactaaagttccagtatgtatggctaagactcaatattctttaactgatgaccaaactaaattaggtagaccaacaggatttagaataactgtaagacaagcaacaatttcagcaggagctggatttatagttgcacttactggagaaataatgaagatgccaggattaccaaaagttccagcagcagaaaaaatagatgttgatgaaaatggagtaatagctggattattctaaggaaattaatttataaataaagagtaggagatatcttaaaatagttcgtaaaatatctcgaataatttgagatattttcctacatcctttcaaggaggattatcatgaaaatagcagataaaacttgtgttgattttgtagaagtactatcttccaaagaagcagtaccaggtggtgggggagctgctgcactagtaggtgcaataggtatggctttaggtagtatggtatgtaaccttacaatagggaagaagaagtatgctgagtatgaagaaagcgtaaaagagatattaagtaaggcaggaaagttagaaaaagatttattaaaaatgatagatgatgatgcagaatgtttcttaccattatcaaaagcttacgggcttcctaaagaaacagaagaagaaaaaagaataaaagcagaaacaatggaaaaggcattaaaagttgcttgtgaagtaccattaaacatagtaagagtttgctatgaagctattaagttacatgaagatttagttgataaaggttcaagacttgctataagtgatgttggtgtaggagttcagtgtttaagagctgctatacttggtggacaattaaatgtagttataaatataaattctatacaagataaagaatatgttaataaggtaaaaatagaagtagataagttagttgaagatggtgtaaaaatttgtgatgaagtttatgccaaagttgaaaaagctcttggaaaataatttttaaatgacgaaagtagatactatgttattaatatgtggtatatagaataaattaatttaagtttgcttgtaggggagttgtgaatgtatggaaggaatgtcaactaaaggacaaattataaaaggaaaacctgtagctgataaaattagtgaagaattaataaaagaagtcgatttactagttaaagaaggtataaatcctaaactaacaatagttagagttggggcaagaagtgatgatttatcttatgaaagaggagcactaaagagatgtcaaaacataggtataacaacagaagtgttagagttagctgaggatataacacaagaggaatatattgatgtattaaagagagttaatgatgacaaaaatgttaatggtatattatgttttagacctcttccaaaacacttaaatgaagaagttataaaatatgttattgcaccggaaaaagacgtagattgttttagtccaataaactctgctaaggtaatggaaggggataaaagtggatttccaccatgtacacctacagcagtagttgagatattaaaacactataatgttgatttaaaaggaagtaaggtaacagttcttggaagatcaatggtagttggaaagccagtatcaatgcttttattaagtgaacatgcaactgttacaatatgtcattcaaaaactaaaaatctatcaggtgtagcagcagaggcagacgtgctaatagcagctattggtagagctaagatggttgatgaaagttttgttaaagatggagcggtagttatagacgttggtataaatgttgatgaagaaggaaatttatgtggagatgttgatacaaatgcagttttagacaaagtatcaatgataactccagttccagcgggggttggttcagttacaacatctatacttgcaaaacatgtagttaaggcttgtaaattacaaaacaataaatagagatatatatgtggaaggtttaggggggaagtagatatgataatttctgaaaataaaccattagaagaagtgctagggtacttaaaggattttgacaagctggttttagttggttgtaatcaatgtgcagcaacttgtaaaagtggtggggaagaagaagttttaaaaatgaaggaaactcttgaaggtgaaggcaaaaaaatcttaggatatgtaatgcttgaccctgcttgtaaccttttaaagtctaaaaaggatttaaaggctctaaaagaagagactaaggaagctgatgcagttttatctttagcatgtggagatggtacacagacaatagttaagaatttaaaagataagccagtttatccagccaacaatactttgtttataggggaagtacaaagagttggagaatatgaagaagcctgtaaggcttgtggagactgtgaacttggttggacaggtgggatatgtccagtaactatgtgtgctaaaggtcttatgaatggggcttgtggtggagctaaaaatggtaagtgtgaagtaaactcagagaatgattgtgcttggataaagatatatgaaagactagaagctataggacaattagataacttagcagaaataagaccaccaaaagactattctaagcaaaataatccaagaagtttaagtgcaaagaaaaagaaagaagcagcagcaaattcataaaagttttttttagaaggttaaaagggggattagagatgagcttattaagagaaacattagaaagtggaaaatttgcagttactactgaaatggctcctccaaaagggactgacctttcacatttaatagaatgtgcaaagccgttagttggaagagttcatgcagcaaatgtaacagactttcaatcggcagttatgagagcaacttctcttgctacatgtaaattattaaaagatgctggattagagccagttattcaaataacagggagagatagaaatagaatagctatacaaggagaaatgttgtcagcaggtgtatttgggataaacaatttgttggcactaacaggagaccatactagcgtaggagaccatccacaggctaagggagtgtttgatttagattctgtggggatacttcaaactgctgagactttaatggcaggtacggacatggctggtaataagttaaaaggttctccagatttttatctgggagcatcagtaactccagaatattctccaatagaagttcaattattaaaaatgcaaaagaagataaaagcaggggctaaatttttccaaacacaagcactttatgacataaatacaatgagaaagtttagagaattaacaagggatatggattgcaaggtattagcaggaatagtacctttaaaatcaccaggaatggctaaatttatgactgcaaatgtaccaggaatattcgttccagatgaacaaatcgaaagattaagagcagctggaaaagaaaactgggtaagtgaaggaataaaaatggcaggggaacttatcaaacaattaaaagaagaagatttatgtgatggtgttcatataatggcaattggggcagaagagaatatacctgctatactggatgccgcaggtttatagtattgcaagattgtagattatattaggtttgggggaattaaggatgaagatagtagtagtaggtggtggaccaggaggatatgtagcagctataaaagcttctatgcttggtgcagatgtaacggttattgaaaaaagaagagttggaggaacttgcttaaatgcaggatgtataccaactaaagcacttcttgcttcttcaggagtattgaatactgtaaaagaagcaaaggattttggtatagaaatagatggtacagttaagccaaacttcactgccataatggaaagaaaaaataaagttgtaaaccaattaataagtggtatagagttcttatttgaaaaaagaggagtaaacttagttaatggttttggaaaattaattgataaaaacactatagaagtaactaaagatgatggaacagtagaaactataaaagcagataagataatactagcaaatggttctgttccagttgtaccaagaatgttcccatatgatggaaaagttgtaataactagtgatgaagttcttggacttgaagagatacctgagtctatgttaatagtaggtggtggagttataggatgtgagatagggcagttctttagagccttaggaacagaagtaactatagttgagatggttgaccaaatactattaaatgaagacaaagatgtagctaaacaactacttagacaatttaagaaagataaaattaaggttattacaggtattggagtacaaacttgtgaagtagttgatggtaaggcggttgcaactctttctaatggaaaggttatagaagcacaatatgcattagtatgtgttggtagaagacctaaccttgacaattctggagtagaagatataggaattgaaatggaaagaggaaaagtagtagttaatgaacatcttgaaactaatgtagaaggtatatacgcaataggcgatataatagatactcctttcctagcacatgttgcttctaaagaaggtatcgtagcagttgaaaatgctttaggtaagactaaggtagtagattatagagcaattccaagatgtgtttatactgaacctgaagttgctggtgttggtaagactgaaaagcaacttgaagctgaaggtgtagaatacaatgtaggtcaatttgattttagaggtcttggaaaagcacaagctataggacatttccaaggatttgtaaaagttatagctgacaaagaaactgataagataataggtgcagcagtagtaggacctcatgctacagatttattgacagagttgtcacttgctgttcatctaggattaacagtagaacaagtaggggatgcaatacatccacatccaagtttatctgaagggctaatggaagcacttcatgatgtacatggagaatgtgttcattctgtacctaaattataatagacagacagagtacataaggctctgtggctagatttaagggggaagtcttaaaatgggatacaatatagctgttgcaggaaaaggtggaactggtaaaacaagtctcacagggcttttaattgattatttggttaaggacaaaaagggaccagtattagttgtagatgctgatgccaatgctaacataaatgaagtgttaggtatcgaagttgaagcaacaataggagaaataagagaagaagtaaatcaaagagaaaagttaggcaatgcattccctggtggtatgacaaaggcacaatatcttcaatttagattaaattctataatcgaagaaggcgaaggatatgacttattagtaatgggtaggtcagaaggtgaaggatgttactgttttgtaaatgggatacttagagaacaagtaaacaaaatatctggtcattacaaatacttagtcatggacaacgaagctggtatggaacatctaagtagaaaagtcactagacatgttgatacacttttattggttagtgattgctcaagacgtagcatacaagctgttgctagaataagagatttagctgaggaactaaagttaagtgttggaagaatacttttgattgtaaataaagttccaaatggggttatgaatgatggtgttaaagaagaaattgaaaagcataacctagagctaatcggtgttgtacctatggatgaattgatatatgaatatgattctacaggtattcctttagttaatttacctgaagattcaaaatctaaagtggctatgaaagaaatttttgctaaattagaattaaaataggcttaagggggaaaaaaatatggcatttaaaatgtctactcaaaaatattctggaaaaatatcagaagttgaagtaggaataggggaaaaagcaattaaattaggtggggaaaatgtattacctttttatagttttgatggagaagtaggtaattctccaaaaataggtatacaaatatcagacgtttatcctgaaagctggactgattcatataaggaattatacaaagatgtagctaattgtccagtagagtgggctaaatatgttgaagctaatacacaagcagattttatttgtttaaaatttgatggttctgacccaaatggattagataagtcagttgatgaatgtgctgatgtagctaaggcagtaattgaagcaataaaattacctttagttgtagctggttcaggaaatcatgaaaaagatggtaaattatttgaaaaattagctcaaacattggatggacataactgcttatttatgtcagcagtagaagataactacaaaggagtaggagcatcagctggtatggcttatgcacataaagtaggagctgaatcttctgttgatataaacctagctaaacaattaaacgtattgttaactcaactaggcgttaaaggtgaaaatatagttatgaatgttggatgttcagcagttggttatggatatgagtacgttgcatctactatggatagaattagacttgcagcatttggtcaaaatgataagacattacaaatgcctatcataacaccagtagcttttgaagtaggtcatgttaaagaagctatagctccaatagaagatgagccagattggggttgtccagaagaaagaactatagcaatggaagtttcaactgcagcaagtgttttagtaggtggttcaaacgcagttatacttcgtcatccaaaatcaatagaaactataaaagaattggttaacgcattagcttaattaaattgttaaggttagggggaaaaaataatggcattaaaagctttagatatatttaaattaacaccaaagaaaaactgtaaggattgtggattcccaacttgtatggctttctctatgaaggttgcttcaggagctgtagaagtaggtaaatgcccacatatgtctgatgacgctatagcaaaattatcagaggctactgcacctttaatgaaagctttaaaagttggtgctggtgcatctgagtatgaactaggtggagaaacagtattatttagacatgaaaaaacattagtaagtagaaatagatatgcagtttcattctgtacttgtatgagtgatgaagcagtagatgctaaaatagctaacatgaaaaaagttgactatgtaagaattggtgaacaaatgaaagttgaaatggctgttttagagtattgtggagataaagatgcgtatttaaaattaatagataaaataaaaggcagtggattagaagtagcttatattttagcttgtgatgatgcacaagtagttaaagaagctgttgaagtattaaaagatgctagaccaatggtatatggagcaactaaagagaactacaaagatatgatagaagtagttaaaggagcaagtttaccattaggtgtaaaagctggtagcttagaagaattatatgaaacagttgaattaattcaagccgctggatataaagaattagtattagatgtaacaggagaaaacataaaagatacttacactaatgctatacaagttagaagaacagctttaaaagagcaagatagaacatttggatatccttcaatagtatttgcaaatagattatctaattcaaaccctatgatggaagttgctttatcatcaatattcactataaaatacggttctataatagtaatagatgatattagttatgctaaggcattaccattatttgcactaagacaaaacatatacactgacccacaaagaccaatgagagttgaaccaaagatttatccaatcaacaacccagatgaaaattctccagtattagttactgttgactttgcattaacttacttcatagttgctggtgatatagaaagatcaaaagttccagtatggttagtaataccagatgcaggtggatattcagttcttacatcttgggctgctggtaaatttggtggaaactcaatctctgctttcattaaagaaagtaaggtagaagaagtaactaattgtaaagaccttatcattccaggaaaagttgcagtacttaaaggtgatatagaagataacttaccaggatggaatgtagttataggaccagaggaatctatggaattacctaagttcttaaaaggataccaagaaaaagcatgccaaacaaactaataaaatattaactaactattaatattaaatttaaagggggacattataaatggaaaaatttatgattataggtgagagaatacattgtatatcaccttcaataagaaaagcattagcagaaagagacccagctccaatcttaaaaagagcaaaagagcaattagaagcaggagcacactatatagattttaatataggacctgccgaaagagatggcgaagaaataatgacatggggaatcaaattacttcaatctgagttcaacaatgttcctatagcattagatacagctaataaaaaagctatcgaagctggacttaaagtttatgatagaactaatgcaaaaccaataataaactctgctgatgctggctcaagatttgatttaatagatatagcagctgaatacgaagcaatggttataggtttatgtgcaaaagaaggtatcccaagagataatgatgagcgtatggcttactgccaagaaatattagaaaaaggcttaatgttaggaatggagccaactgatatactatttgacccattatgcttagttataaaaggtatgcaagaaaaacaagtagaagttttagaagctataaaaatgatgactgagatgggacttttaactacaggaggattatctaacgtatctaatggatgtcctaagcatgttagacctgttttagatagtgcattcttagcaatggcaatggctaatggatttagttcagctataatgaatccatgtgacccagaattaatgaaaactgtaaaatcttgtgacataatcaacggggcatctttatatgcagactctttcttagagttaaatgaaggtggatttgctttctagggtttttagggtatagttaataaaaaataggtgtaaatattaaagggggaaatagaatgaatctatataatataatctttacagggtcagaacaagctttaggtgcggctcaagctatgttagctgaagctatagaaaagaatggaaaagagcataaagttgctttccctgatacagcatattcattaccttgtatatatgctgcaacaggacaaaagatgaacactttaggggacttagaaggtgctttagaagtagtaaaatctttaataaatagaactcatttactagaacatgcttttaatgctggtttagctacggctttagctgcagaagtaattgaagcattaaaatattcaactatggatgctccatatagtgagccatgtgcaggtcatataactgaccctataatcagatcacttggtgtaccattagttacaggagatatacctggtgttgcagttgttcttggtgagtgtccagatgcagaatcagcagcaaaagttataaaagattaccaatctaaaggtttactaactttcttagttggtaaagttatagaccaagctatagaagctggagtaaaaatgggtcttgagctaagagttatacctctaggatatgatgtaacttctgttatacacgttgtatctgttgcagtaagagcagcattaatattcggtggattaactcctggtgatttaaacggattattagagtacacagctaatagagttcctgcatttgttaatgcatttggaccattaagtgaattagttgtatctgcaggtgctggagcaatagctttaggattcccagttataactgaccaaacagttcttgaagttccaatgaacctattaactcaaaaagattacgataagatagtagctacttcattagaagctagaggaataaaaataaaagttactgaaatacctatcccagtttcatttgcagcagcatttgaaggtgagagaattagaaagagcgatatgtttgctgagtttggtggaaacagaactgaagcttgggagcttgttgttaagaaagaagcaacagaagttgaagaccataagatagaaataataggaccaaatatagatgaagttgatgcagatggtgtattaagattaccgcttgctgtaatagttaaaatagctggtaaaaatatgcaagaagatttcgagccagttcttgaaagacgtttccactacttcttgaactatatagaaggtgtaatgcacgttggacaaagagatatggcttgggtaagaatctctaaagatgcatttgataaaggatttagacttgagcatataggagaagttttatatgctaagatgttagatgaatttgaatcagtagttgataagtgtgaaataactataattacagatgctgaaaaagtgtctgaattaaaaggagaagcaatagctaagtacaatgctagagatgaaagattagcttcattagttgatgaaagtgttgatactttctattcttgtaacttatgtcaatcatttgcaccagctcacgtttgtgttgttactcctgaaagacttggtctttgtggagcagttagctggttagatgctaaggctactaaagaattagacccaacaggtccttgtcaaccaatagaaaaaggcgagtgcttagatgatagaacaggtgtatggaattcagtaaatgaaactgtaaaccaaatatctcaaggtgcagttgaatctgttacattatattctatactagaagacccaatgacttcttgtggatgcttcgaatgtatctgtggtataatgccagaagcaaacggatttgttgtagttaacagagaatttgcaagtgttactccagttggtatgactttcggagaacttgcttctatgacaggtggaggagttcaaactccaggatttatgggacacggaagacatttcatatcttctaaaaaattcgcttatgcagaaggtggaccagaaagaatagtttggatgccaaaagaattaaaagattatgtagctgataaattaaatgctacagttaaagaaatgactggaatagaaaacttctgtgatatggtttgtgatgaaactatagctgacgattctgaaggagtattagctttcttagaagaaaaaggtcatccagcattagctatggaaagtgtaatgtaattgatggaaaatttaaaataatatgatataatattaatatgatttaagtaatttaatcaataatataatattgggggtctatcgaaatgaaattattaccagaattaaaatactctaaagatcatgagtgggtaaaagtaattgatggagatgttgtatatataggtataacagactatgctcaagatcaattaggagaaatattgtttgttgaaacaccagaagtagaagatactgtaactaagggagtagattttggagtagttgagtcttctaaagtagcttctgatttaatatctcctgttaatggtgaggtattggaagttaatgaaaaattagaagatgagccagaatgtataaatgaagacccatatgaaaactggatattaaaagtaaaactagctgatgtggctgaacttgatacgttattaagtgataaagaatacgaggctggattagaataattaaagattaagatattattataattggggaaagtatagtaaaatttgagtgcacgcaaatttagctatactttccttttatcatatatagaacaaattgggagggataacatgataaaagtgagttttacaccaaacaataaagaggtttattgtaatgagggtgatatattactagaggttgcaagaaatgcagatatattcatagatgctccttgtaatggaaacgtgtcttgtgggaagtgtaaagtaaaattattgaatggaaaagttgatacagaaaaaacaagacatataacagatgatgagtgggagcaaggttatatactagcttgttgtacaaaggtaatatcagatatagaaattgaagttccttctaaagtatcatcttctatgcatggtatgaagatagaaggtagtaataaaaaagaggatagggaaatttttgaaagagctaaaaaaataattgaagaacataaccttcaatttaaaacaaatataaaaaagaaatacatagaaatggaagaaccaaatttagatgataatataagtgatgtagatagattggaaagatatgttagaaatagcctaggatataatgaaatagattttagattggatatacttagaaaaatgccaactgtatttagaaagagtgattttaaggttacaataacatatgttcaaaaacaaaagaaacttacaatcataaatatagaacaaggtaataaagaaaattccttatacggagttgcaatagatattggtacaacttcagtagttgtttgtttagtagacctatattcaaaagaggtagtagataaagcatcttctggaaatgcacagataaaatatggagcagatgttataaatagaattatatattcaactaagaaaaatggattagagacacttcataaagctatagttgaggaaactataaatccactattaaaaacaatatatgaaagaaatggaatagataaggaagatgtagttacattagtggctgccgggaatacaactatgacaagtttattcttgggtgtgtatacagacttcttaagacaagaaccttacataccaccatttttaaaatctccaaaacttatgggtgaaaatgttggtctttttgtaaatgacagtgcatatgtgtacttagctccatctgttgcaagttatgtaggaggagatataacagcaggtgtattatcagcagggatatggtcaagtgaagaaaatgttttatttatagatttaggaactaatggagagattgtatttggaaataaagattatatgatgagctgtgcatgttcagcaggacctgcttttgaaggtggagggataagctgtggaatgagggcatcagcaggagcaatagagaaagtaattattgataaagaaactttagagccaacattaaagattattgatgaatgtgcaccagttggtatatgtggttctggtataattgatttaatctgtcaaatgattactaaaggtgtaatagatagaagaggtaaaatatacagggatttagataataagagagttagatttaatgagcatgagataggagagtatgtattagcatttaaagaagaatttgatttagaaaatgatatagtagtcaatgaagttgatatagataatttcatcagagctaaaggagctatatattcaggtgcatacactcttgtagatagtttaggtatggattttagtatattagatagggtttatatagcaggtggtataggaaacaacctagacatagaaaactcaataattatagggttacttcctgacattgatagagaaaaatttacttatatagggaatagttcacttgttggttcttacttagctctcataagtaaagatgcaaaaaataaacttgaagaaataggtaatcaaataacttatgttgaacttagtgtatatccaagttatatggatgaatttatttctgcatgtttcttaccacatacgaatatagagcagttcccaacagcaaagaaattactagaagagtaaaatgtacttaagaaggaataaactatgaataagaatctatctgaaaaaatgaaaatagcatttgatattaaattaaagaattttggaaataaaatagagtttgcttatcctaaccagacactagctcttagtactacaagcaatcaatgtagtttgaaatgtgcccattgcaacggtcactacttaaacaatatggtgccaatagaagaatatgaggaaaaagtacaatcaaggaatataactagctttctattgagtggcggttgtagttatgagggagatgtccctataaatactcatattaataccattaaaaacttaaaagagaaaggatatagattgaatgctcatttaggtcttatggataaagatagcattgtagagttgtgtaagtatttagatatagtttcttttgatttagtgtttgatgatgagacaataagagaagtttataagatgaaaaagagtaaagaagattatattgaagtttataatacaatacaagaacatacagaagtagcaccacatatatgtattggtttaaaaggaggacaaataaagggtgaatatgaaattatagaatacctacagaaaaatcctcctaataagcttacatttatagtccttattccaacaaaagggactgagtatgaaaatgtagaacctcctgagttagaaggggtagcagatattttatgtgaagctagaattaatttaccagatactgaaattaatctaggttgtatgagaccaagaggagtgtatagaaaagagctagaccaattatctataatgtgtggagtcaatagaatagtattaccatcaaggtctgcaaagaataaggctatagaaatgaatatgacaataaatgagtgtaaggagtgttgcgttttatgattagactatcagttgggacagcaatagagcttgggatattaaacaaaaaaagcgatatacctcctaccacagcatatataatgattggagaaaaatgtataaataaatgcagtttttgttctcaatcaatagaaagtagtactagaaaagataaattatcaagagtaatttggccagagttttcaaaagaagaaatattagatgctttaaaagcttataaaggaaaaaatataaagagaatatgtattcaatcaatggcaagtgaagaagcacataactctgttttagactttataaactatataagtggtaagatagacatgccaatttcactatctgcaaaattagaaaatgatgaacagataaagaagtttttttcagtaggagttgataaaataggaatagcaatagatgcatcaaataaagaactatatgaaaaaataaaaggaaataactatgatgaaaagttaaaatttataactgaaatgtcaaaatcatatcccaataaaataagtacacatataatagttggtatgggtgaaagtcatgaagatatatacaatttatatatttatttaaaggaaaatgatgtaacgattagtttatttgcatttactccagttagaggaactaaaatggaaaagataaatcaaccaagcatagaaagttatagaagggtacagttaatgtcttatatgataaataaaggttatccaaaagagtattttaagtttaaaaatggatacttaaatagtataaagcttgacaatgatattttaaaagacataaacaaaggctatccttttgaaataagaggttgtaaggattgtaatagaccatactataatgaaagacccggaagtactatatacaactattcaagacctttaaatcaaagtgagatagatttagcaataagagaaataaatctatagaggatttctaggatatatttatactaaaaatgggggcgtaataatcatgaatcagtggagagttatacataataaatcatatgaaggagcaatgaatatggcaattgacgaagctatatttactgcatataagaaaggacataataagccaactcttagattttatacatgggaaccagcttgtttgagtataggatattttcagaaattggaagatgagatagatttagataagtgtagatgtatgaatatagactatactagaagaattacaggtggaagagctgtattacatgataatgagctaacttatagtataattataggagaagataatcctttaatcgataagagcatcaacctatcttatagatatataagtgaaggtctagttaaaggattgaatctaagtggtatagaaacagataatttaaatagaggcgagagaataagtagggaaaatttatcagctgcatgttttaatgcacatgcatcatatgaagttactattaataataagaaggtaattggaagtgctcaaagcagaaaagatggtgttttattacaacatggttcaataatactggattttgatgtagaaaaattgtttaaattaataaaaactaagacaccagaattgaaagaaagagctatgaaatttacagctaaaaaagcaagtggaatagaaaatgaaattggcagaaaaatagacatagatattctacagaaaaacatagtaaagggattagctgaacaatttaatgttgagtttgtggagggcgatttgactgattatgagaagcaattagttaaagaactatatgaaaaatacaagaatgaagagtataataaaaagcgttaactttaattgactttacataaattaaagtgatatacttaaggtataataatatacaaaaactgaaatcatgaaggtttctttggagtattgaaatacctaagggaatctttttttgatttttaataaaaatcatattaggaggagatttatatgtgtgaatcatcagctttcatttgtaaaagtaataatgagttagaaaaggttatggaaaatgtggttaatatagacccttgtgatggaaagatttatttaacggatttattaggagagcaaaagataatagatgggataattaaagaaataagattgatggaccataagataataatacaagaaaattaattaataggggaatttcatatgataatagcagtgatagatggaatgggtggaggtattggagcccagatagtttcttctttgagagaagagttacctacatatgtagaaatttatgcactagggactaattctatagcaactagttctatgatgaaagctcatgctaataaaggagctacaggggaaaatgctatagtagtatcagctaaaaaagcaaatataatagttgcacctatttctgtaataatacctaattctatgatgggagaagttacttgtaatataagtgaagctattgcagacagtgaggcacttaagatacttttacctattatgccagaaaatgtggagttagttggattagaaggtaaaccattagcactacttgtaaaagattctgtaaaccttataaaaaaagagtttaatataaaataacagggggaataactaatgatttttgataaagagattgtaagatatcatcatggacatcatgaccatgaccactgccacgaacatactcatggagatatatgtcatgaacatccacatgaccatgctcacgaccacgaccatgaacatagtcatgaggaatcatcagagtctaaggatgaaaaaactttaaaaatacttttagtacattggataaatcacaatgaaactcatgaagaaggatttagagagtgggttgaaaaggctagagctattggaaaagaagaaacagcaaagagtattgaaaaggctatagagtatatggaagaagctaataaaatgttgttagaggctaaaaaacatatgtaaatataattaatcgcttatacgtttgatataagcgatttttatattttatgatgtttaattattaaaaattttatctaaggggttatctcaagatggatgtaagcctccctttcattgttgaaatgataaaaatatatctaatttcatgcaaaaaagagtatatcatgaactaaaaagtttattttgagatattttctgtaatatactttaatgagtaaattttattacaagattggattatttaatgttaaataattatatattctttaaatactgcaaaagcttcatcaaacaatttgagttatttgattaattatatattgagtattactatttaaagatagtattaatgttaagttaaaaaataatattaatgttaagttgaaaatagtactaaagataagatacttaaaaggcagtttaaaattactctaatattagatataataaaaattagcatgattaaaaatattattttgaagttaaaaaatttatgcatttatattagattttttctttaaaaaaggagtgaattatttatgaaagatggtcatatacattcaccttattgtcctcatggaagtaaggatgattttgaaaaatatgtacaaagagcaatggatgttggaataacagaaatgacatttacagaacattttccgtatgcaaatggatttagagaccctgctcctgaaaatgatagttgtatgagtattgaagatttaccaaagtattttaatgatgtcaagaagttgaaagaaaagtatgagggtaaaatcaagataaatgttgggtcggaagtggattttatagaaggatacgaagaagggataaaggagaatttaaataaatatggaaaggaattagaagactctcttttatcagtacatataattaaaattgatgatgattattattgtgtagattacagtgtagaggagtttcaaaatttaatcgacaaattaggaagtattgaagctgtttataataagtattatgaaacattgataaaagctgtaaattcagatttaggtatacataaaccaaaaagaataggtcatttaaatttagttagaaagtttaatcaggtatttccatacgattataaaggaaatacaattcttgaagacttaataaagttaattaaagaaaaaggttatgaacttgattataatgtttctggaaatagaaaagagtattgcaaagagccttatatagatggatacttattagagttggtaaaaaaatacgatattccattagttttaggttctgattctcactgtgcagaggaaataaataaatacgatattatttagatatattcacacaaaagactgtagataagtttgtataaaataaatttatgtacagtcttttgtaaatttatatgattgaaaatagtaatagaacttaaataaaataacaataagttctaagtaaaataacaatagaatctaagtaaaataataataaaattcaatagaataataggacttagaattaatctatcttatttatataaacattcttatataagattgtagataagattgtatttacacaaatctatagaccttctctattatattgacttagtaattataaatactattttgcgtttaaagttattatttcataagtttatcgttttccattattatagggtcaggcaattcaatttcaccttctgacatcttcaatctattaaacatataattttttacaccttttttatttttaaatttagtaacttgataaggtgatgtaacaccatatttttctaaaaatagaatgccatttttagttttaatacatatgcctgtatgacctataaatacgtttttagtttctggataacgaagaaatccatttataatagatatatttttattatttttaaaagatatttttctttttttccattcattttttatttgttctgcaattttgattgtatcatctgtatctttagctggtattgcagaaaagaagttgataaatttttctacatctttggtgctaaatttagcatctttattattcattatagtgtctaagtcgacattcaaatcaatagagtctccagtaaatttcttatttgaatttataaaatctttaaaaagtctaaaagcagttattctacaatttacatccatataatcagggaattttttcacccaattatcttgcaatttttctaggttatatggaacttgttttgcattgattgaagaatatccagatttagatatatttatattattttgaagtattttaacttgcaatttattataattgttgactgctttaataaatgtatctatgtctttttcattaattttattttcttttaggatttcctttacactattttgagtttttttatctatcatattagaatatatcaatttattattattatatttaatatttgaatatgcaaatatcgtaagtatacttgatagtactaagacaacagacaatatcattattattaatctttttttcatatttagttctcctttttaaatttattgtgtcgacatatttatagtatatagtacctttaaatttaccttcaatatgtttttaattacaaaactgttgtaaaaaatataactttatttaaaacttttttttaatatataaatatatatactaatagggggtacttatttttagaatattcagtaaaataattttgatatactctatatattttgtatgttaaaagtaaataaattattgttaaagaatgtaaagacttttaaattttttatcacaggattttaagtaaataagaaggattggagtaattaaaaatttttattttgcaaaaataagtatttatttatatggataaatttgattttaaatctatcaatatagataaaatcttattatttaacttcaactattccttaaaaaagcaacttttaaggaatagttgaaacaaaaagtttggttacataatagtaattttagttacaagaatgaaactgtaaaacttaggattttctttatataatttcattgagaacatttaatttaggaggtaaggtatgaaagtaaaaaaatttaaaagtggtatagtaatggcattaacagtaatggcaattggagcatcattgacaaatgtatcagctatggaattaaacaagagtaaagagtttgaaactaaatacaatgaaatgaagagggattttcaagaggattatggaaaagaagacaaatttaatataacattggatgatgaatttacaaaagaagaagtaaatggagctaaagggattataaagacaactaataaaatgaataatgaggttgtagtattaaattattttgatgaaatgaaatctgggattgaatttgagttgaaggcaaaagcagaaaaaaatgcaattttgagagatgaatttcaacaaggttatggaaaggaagataaattcaaagttgtgttagatgatgaatttacaaaagaagaggtaaatggagctaagggcattataaagactacagataaagagacaggtgaggttatcgtatataattactttgatgagcttgaaaaataatgcttaaagattactttgattgaatgaaaaggtaattgtgttgagaatattaaatgactgaataaaaacagttgtatcaaaaacaaacaataatagaatgtaagaatgattgtgtcgaaaatattaaatgactgaataaaaaatagttgcgtcaaaaacaaacaataatagaatgtaagaatgattgtatcaagaatataaaatgattcaacaaaaaacgattgtgttaaaaacaaacaacaatagaatgtaagaatgattgtatcaagaatataaaatgactgaataaaaacgattgcgtcaaaaataaacaataatagaatgtaagaatgattgtatcaagaatataaaatgatttaacaaaaaacgattgtgttaaaaacaaacaataatagaatgtaagaatgattgtatcaagaatataaaatgatttaacaaaaaacgattgtgttaaaaacaaacaataatagaatgtaagaatgattgtatcaagaatataaaatgatttaacaaaaaacgattgtgttaaaaacaaacaataatagaatgtaagaatgattgtatcaagaatataaaatgactgaataaaaaacgattgcgtcaaaaataaaaaacaattaaatgtaagaataattatgtcaaaaatataaaataaattaaaagaaaaagattatactgaaggaaaaagatttgaaataggggtgaactttacatattatagttcacccttatacaaaaatataaaatataatttattataggaaaatttaaaaaaatcagtctatttaatttatactgatgtattgtaggattttacaaacaaactgttatataactttttttatctccaattttgattttaagatatctaagaatttataacaatcttctggatatatttctcccatatttgcaacttggaatatgttagcatctaggaatttgccttttcctggatagacaacatagccactttccctttctaggcctaatataaactcatttacattgatttctttaggtagaaatacagatgttactgtattagacatatacttatctggaagtaaaaatgttagccccaattcttccatgccattccttaaaatagcagaacattctttgtatctttctattttactgtcatcttccaaaaactcagttaaagcttcattaagggcaaatattaaagtaacattaggtgtatttggtgtttgagaagatgatttagcaactttatagtgtttataaagattaagatatacattcttacattgattttctttaatattttgtaaaatactctctttagcacaaaggtatgcagaacctggaaatgctccaagagctttaccaccaacacctgttattatatctatattaaactcttctacatcaatatattcacctgctgaggcacttattgcatctacaaaaaatattttgttatacttcttagcaagttttcctagttcagggactggatttatcattcctgaactagtttcatggaacaccatagcaattacttttatatcagaattttcaattatatatttttctaaaatgtccaggtctgggtattctgcccattcaaaattaggcttatatgtttttacattataagtaaataatatttcttctagcctttctccaaaaacaccattactaactagcagaactgcatcttctttgtcaaagatagaagatagtacacattcatttacagatgttccagagccagatacaattaatgagtagtaattagaagttgcattatatagtttattgattttttgttgtgtatctttgaataaatccataaactcgtttcctctatggcatatatcatagtgaagaagtgaatttctgactttatctgtaaccattactggtccaggactgaatagatatgtttttttcattgtaaagcctccttaaaaagttaaatttaaattttcgaatgactgactatgtgtaaatattaaaatattgtgtgttattttaactagattatagaataaaataatgaatattgcaataatatttcaataaaaatacttttttaatcaccataattaaaaataacaaaaaatattgtaatgaatattgcataaatccacatgatgatataaaatataaataacttgaatagattatatattcaaaaaataaaaaagaatttattaattctgaaaataaagggggacattttaagtgaaatatgtattagcaattgaccaaggaacaacaggaacaagagcagtattgataaacgaaaaatcagagtttgtttttagcgattatatggaacatactcaaatatatccacaatctggatatgttgaacatgaccctatagaaatttggaataatacaaaaactgtgagtaataatgtattacaacaggcttttgaaagtggaatcaatgaaagtgatataaaaggaattggtatagataatcaaggtgaaacagtaatgttatgggataaaaatacaggtaaaccactttacaatgctatcgtatggcagtgtaggagaacttatgattatgtggaaaatttaaagaatataccaggtttagaaaataagataatagataagactgggttaattatagacccatatttctcaggtacaaaaattaaatgggtaatagataatgtaaaaggtgtaaaagaaaaaattaaaaatggagaagtacttgcaggaacattggatagttggttaatatggaaaatgacaggaggaaaatcttttttaactgatgtatctacagcagcaagaacaatgctttttaatataagagatatggattgggatagagagttgcttgacattataggagtgcctagaagtattttagcagatataatgcctactagtggtgattttggaactacagataaggaggcattttgtggggtttctataaaaattactgcttcaatggtagaccaaccagcagctttatttggcaatggatgttttgaaccaggaatggttaaaaatacttatggtacaggatgtttcttatatatgaatataggtgaggagttaaatatagcaggtaatggtattttgacaacagttgcttggaagataggagataaagttacatatgcttatgatggtggagtgtatatagcaggtgctgcaatacaatggcttagagatggaattggagttataaaaaattattcagaaactgatgacatggcaaattccatatcaagtactggaggggtatattttgtaccagcatttgcaggtatagcagcaccttattgggaccaatatgctagaggcacaatggttgggataacaggaagtactaaaaaagaacatatagtaagggctactcttgagtctgttgcacttcaagtcaaggatgttgttgattccatgaatttggcttcagggaaagaaataaaaatgttgagagtagatggtggaattactaaaaataactttacaatgcaatttcaatctgacatattagatataccaattgaaattgcagaaaatcctgaaacgacagtacttggtgtagggtatatggcagggctttcctgtggtgtttggaacagtattgatgaaattagaagtgaatttacaataagcaaaaaatatattccaaatatgactaagcaaaaaagagaagaaatattacttggatggaatcaagcagtaaaaagagctatgaattgggaaaacgataccaaaaaggtgtgtgctaattaagttacaatagagtattttacatgtataggaggaattaaaaatgccctttgataaaattatattatacataatggctgtgggagtgcttttaggagcgttagatagaataattggaaataaatttggacttggagagcagtttgaagaagggtttaattcaatgggtccattggctttaggaatggttggtatagtttgtttagctccagtaatttcagatgtactaggtcctataataataccaatattcaatctctgtggagctgacccatctatgtttgcaactattttagcgaatgatatgggagggtatccattggctatggaacttgcacacaataaagaggcaggaatgcttgcaggattagtcgtgtcatccatgcttggatgtacattagtattttcaattccagtaggactaggtcttatagaatatgaagacagaccattctttgcaaaagggttactgataggcttgataacaataccttttggaggtattataggaggattaatagcaggatttaacttatcaatggtaattataaatatgataccagtgataatattggcagtaatattggcagtaggtttaaaatttaattctacacttatgataaatgggtcattagtttttggaaaatttatatctatattgataacgataggtttgggagcagcagcatttcaagaaataacaggtatagtacttataaaaggcatgacacctataagagaaggtattcaagtaattggaagtattgcaatagtgttattaggtacttttccaatattacatttattagttaaagttcttaataaaccacttacaatagtgggtggaaaattaggtatggatgccactagtgcagcaggattagtttttactttagccaatagtattccagtatataaaatgatgaaagatatgagtccaaaggggaaagtagtaaatactgcttggctggtttgtgctacagcagctttgggggaccatttaggatttacagcaggagtagttccagagatgattacacctgttgtaattggaaaattggttggaggagtattggcaattgcacttgctatacttatgacaaaagatttaactttggaagaagaacaaagtattaaaatgaagaaagatgcagtgtagaataaacaatacttaagtcaaatttaagttattttaaagtaggagtttaaataactaaaaataaattaaaaagacagacaattaaaaaataatcgaataaccaaaactgataaattaaataaaatggcaatcaaataactaaaaatgataagctaactgaaagtagttacataattaaaatataaagtatagtttagacataagtggagctaaataaataattatttggctccttaattttaatttattacatcaaggaactaaaaatcaatcatacaagctaattatcagctatgactaaaggtattcctttttgagaaaactctattattatattatggtctatactagcagaggtaataatagtatctatgtgttctataggagctactgatgcaaatgaatttataccaaacttaggaggttcgacaactactatagattttctagacctttcaatcattttttttctaaccagtgcttcttctaagtgatagtcagagattccattttcaagagtgatacctccagcacctaaaatagctttatcaacattaaattgttcaatagctgagagtgtaagtggaccagaaaaagaaccttcagtttctctaagatagccaccaagcacatatacttttatattagtattcataagttcatttgcaactaaaattgagttggttattacagttagattctttttatctttcaaattttttgaaacttcaagtacagtagttccagtatccataaaaatagtatcatttgtatttataaactcactacatttaatagcaatctgttttttatcgtttgagtttattttttttcttttaacatagttaagttctacgctacttgctataactggtatagcaccaccataaactctttttaaaagaccgatactttccatatgggctaaatctcttcgtgcagtttctattgatatatcaaacatttgaactatgtcatttattttaattatattatctgatttgagaatacttaaaatcttctcgtatctttcctgtggtaacataaaatatcctccttggactagtattattttagttttggcataacttacaattaagtcagagtttaggtatatttgttaatgtatgtatatttatcaaataatattataagtgttatgcaagataattttaccatatttaaaacttacatttaagcaaaaaagtaaaaatagatgtttaataattcaaaataactcaaattttataaaacaattgactaaaatatgattttattatataatttactagtatagagatatggagaagtactcaagtggctcaagaggatcccctgctaagggattaggctgggtaaccggtgcgagggttcgaatccctccttctccgccaattgttaaaggctatttttattaaagatagtctttttataatgtcataaatgattagatatgtataattaaagaaaggagggaatagatgacaactttaatttttttcatagtggggatagcatctttggtagttgcttttgttattgatgggggacatattggagtattatttgtattttcatcagcacttgttgtgtttggtggaactataggcgctgttggagcttcgactccattccctgtgtttaaaaagtctataaagataatgttattagcttttaaaaataaaaagcctaataacatagaaaatataatctatttcaaagaaattgcaacaaaggctaggaaagaggggcttcttagtgttgacaaagaaataagtgagaatgatgaattagacccttttattagaaaagggcttgaacttatggtagatggggtggatgcagttactataagaaatatattggaatcacagatacagataacatcaaaacgacataaagaaggaatagcaatttttgattcagcaggtggatatgcacctacactggggataataggtacagttatgggattagtacatattttaggtaatctttcaagtaatccagatgcattaggacctcaaatttctgttgcatttttggctactttgtatggtgttggttctgccaatttaatatggttaccaatagcatcaaaacttaaggctataaatcaacaggaaataagtgaaagacttttggtgatagaagcaatattatccatacttgagggtgataattctaatttaatgacagaaaaattaaaaatatttttaaattcaaaagaactaattgaacttgaagaaattggtggtagagctgaataatataaaaggatggaatgtttatgttgtatgatgaagatgaaaaagaagaaaacaatgagcgatggcttttaacttattcagacctcataacattacttatgattttctttgtaataatgtattctatgagtaatgttgatgcggagaaatataaacaattatctcaatctctaaattctgcttttggtggttcttctggagttattgaaggtggtaatagcaaaatagaaccagtagttgaaccaggaagtaatgatttagatagtttacaaaatgctaagtttaaaaaagttggtgaagaaatccagaagtatttaaatgaaaatggtatggctaattcagtatcattaagagttcaagatagaggattagtaataagccttaaagatacaatactatttgatacaggaaaagcagttgtaaaggataattctagagataagattattcaaataggtaagatgttaaatgaaatgaatagttacatgagagtagaaggtcatacagacaatatgtctataaaaaattcagagtttaagtcaaattgggatttatcagttatgagagcaaccaatgttgttcaacttcttattgacaatgcaggtatagcaccagataaattatctgctgtaggatatggtgagtttagaccaatagcagaaaattcatctgaagaaggtaggtcaaaaaatagaagagttgatatagttttagttgatagtaaatatgataatgtagaaaatgtttcaaaggataaatagttaaattagctgtctcaatacagaattaattctaaaggagatggcttttttatgcgaaaattaaaaatagatacatagtaagttacctttttgtaggaatatatggtatcttaaatatataatatttaaataatatataagctcaattaaaaaaattttatagaggatgggaaataaatggggaataaaaataaaaatacgaaatataaagataaaacaagagaaagatataataaaaaagttgagaatttaaataaagaaaaattaaataaagataataaacagtctaagaaggtagataagattgatgatattattaataaatctagtattgtattatgtgtacttctagtggtgttttcattactttacttatttaaattggttcaacttaatataataatgatacttttagtaattacagtagctattcaacaaggattggtgtcatttggtgcatttagaaataaaaattatgtaaaagctttattttctatatttgtaatagtatgtttcttaattgcttttaaatatgttgtaaatcctgtttaaatatatcaataaacgttctataattaatataaatagtgaagttacagttttaatgctattataaattttataatttgaaggagtagattttatgaataggtgtaagtttgcaaaattaattatcacatcaatgattgttttattacttacaggatgtagtttaaaaaaggaagataattataagttagacccagaaaatccgacatcaatacaaatttggcattattataatggacagcaaaaaatggcttttgataagcttgttaaggaatttaatgacactataggtgctgaaaaaggaattattgttgaagcgtttagtcaaggtaatgtagttgatttatcagagaaagttttagattctgcaaataaaaaagttggctctgaagatgtgccaaatatatttgcagcatactcagatactgcatatgaaatggataaattagggttactagtagatatggataagtacataagtaaagaagaattaaatgaatacatagacgaatatgtagaagaaggcagaataaattctaaggatgagtttaaacttttcccaattgcaaaatcaactgaaattttgatgttaaataaaactgattgggataaatttgcaaaagctacaaattcaaatataaatgatataaaaacaattgaaggattagtagagacatcaaaaaaatattatgaatggacagatagtttaacgaaagagcctaatgatggtaaagcattttttgggagagatgctttagcaaattatattattataggaagtaaacaactaggagtagaaattttttctgttaaagatggtaaagttacactaaatattgaagaaaaagttatgaaaaagctatgggataatttctatgtaccatatataaatggatattttgcttcttatggtaagtttcgttctgatgatgcaaaaacaggtgatatattagctcttgtaggctctagttcaggagcagcatactttccagatagagtaatgctaaatgataatgagagttataatattgaaacatctgtttttcaagcaccacgttttaaaggagaaggaaaatatgctgtacaacaaggtgcaggaatggctgtaacaaaatctactaaagaagaagaatatgcatcagtagaatttttaaaatggtttacagataaagagcctaatataaaattctctattgcttctggatatttaccagtaaagaaaaaaacgaatgatttgaatgttataaaagaagttatgaagaaagataatttgagtttatctgataaagttgaaggttcaatagcctcatctattgaacaaattaacagttgtaatttatacactaataaagcatttgatggtggaactaaagctagacaaatacttgaatattcaatgcttgataaagctaaagaagattcaaataaaataaatgaattggtaaaaagtggaacttctaagaaggatgcggtagcacaatttaataatgataagaattttgaaacttggtttgaaagttttaaggctgagcttgaaaatgctataaaaaaatagatgaattggcagttagtgtgtagacaagcacaaaggtataggtggaataagtatggaaaacaatctaagaaaaaacaattcaataatgaaaaagatgatatttcccctaattattgttatgctaattcaaacaagtttattttgtgccacaattttatggggaggaactattaagaaattaaatgataattcgtttgacatcttaaatgaaagagtaattaatcgtaaaaattatatacaaaatgaaatgttacaaagatggtcaaatacaagtgaaacggaagctacaattaattcctctgtaaaaaaaatattaaatgaaaaaaatgccttaattgaggatgtaggcaacaatgaagaaattaacaaagatattataaaaagcatatcaaatgatttaatatatcttttgagaaaaaactctgttacaggagcttttataattctaaatgacaaaaatattaacgataagccaatagatagtaaaggtgaaataagtaggactggattgtatataagggatttagaccctaagtttaatccaaatgataattctgatttgttaattgagagaggttcatcagatatagcaagaagttttggaatatctatggacagttattgggaacctaaattttcatttaaaagtgaaaatgagcaagagggagatgattttttttataaaccatttagagctgcaattgataatccaaacgtatcaagttctaatttgggatactggggaagtaagtttttattgacaaatgcaggtgataggcttatgacatatacagttccccttatttatgaagatggaactgtatatggagtacttggaatagatttaagtgtaaattatttaagagaattacttccatactcagagataaatggaaataaaaaaggtaattatattttaggtgtagatagaaataatgatatggcctttgaaaatgtaatttcaaatggatactcattaaaagaaaaattttgggatggtttacattctaatttagagcagaaggaatcgtataaaaatatatataagattaaaaataaagataatgaatgtggtaatggcaacatttatgctagtgtacaatacttagatttatataactccaatactccatttgaaaatgaacgttgggctcttttgggtattattgaagaaaaaagtcttttgtcattttcaaaaaggatagagaaattagttataatatctatagcaatttctttattaataggtctaataggtatttacattgcatcaagattatttacaaaaccaattgttcttttagccaacaaagttagaaacagtaatccatcaaaaccagtaaatcttgataagataaatatatctgaaatagatgaattatcttcagctatagagttactcagtgcaaatgttgcagattcttcatcaaaattatcacagattattgaaatggtagatatgccaatcggggcttttgagttatacaaaaacgcagagaatgttttttgtacaaaagataaaaaacttaagtggataagaatgaatatctttgaagatgagctaaaggttcttggtgttgttgttgatgtcacaaaagaatttattgagaaaaggaagatagaatatgaaagagattttgatattttaacgaatcttttaaataggagagcttttcattcacagatacaagaaaaatttaagaataaagatgaacttaagatagcagcatttattatgtgggatttagataatctaaaatatattaatgatacatatggacatgatgctggtgatgaatatattaggtgtgctgcagacatacttaagaagtttatatcatggaatggtatagtatctagactttcaggtgatgagttttatgtatttatatatggatatgaaagtaaagatagtataagagatattattaattctgttaagaaacagatgaataataccttattaaaacttcatgatggaacagaatttaaaataagggcatcagcaggaatttcctggtaccctgatgattcaaccaactatgatgaattaatgagatacgcagattttgctatgtatcaaattaaaaatacaatcaagggggaagttagtgaatttgatattaatatatataataaggattcattcttattgagtaatagagaagaattaaacaagttaattgatggtcaattagttgagtatgcatttcagcctattgtagattgtaaaggtaaagtatttgcatatgaggcacttatgagacctaaaataaaaacttttagttcaccaatagatgtaattagattagctcgttcacagtctaaattatatcaaattgagcgtattacatggtttaaagcacttaaatcatttaaaaaatacaaagaaaaatttggcgattgcaaactgttcttaaattctattcctaataataatttatcaaaagtagattttgaggaaattgaagatttatatggtgaatatttaaatagagtagtattagaaataacagagaatgataagattaatgaagattttattgagaaaaagaaagcatatatagaccattggaatatagaaattgctttagatgactttgggacaggttacaacggagatgctgtactattatatataatgccagactatgtaaagattgatatgtctattgtaagaggtattgataaagatgaaaacagacagaaaatattaaaaaatcttatctcatattctaacgaaagaaatattaaagtgatatcagaaggtgtagaaacaaaaggtgaaatggaaacactgattaatcttggagtagattatatgcagggttactatattagtaaaccatcatttatacctgaagatataagtgacaaaattaaaaaagagctcaagatatgtcatgaaaataggaatgatgtggtttaatagaggaaaaattaaatttatttttatgaacttttagtttataattaaaaagaaaataatataattataaattaaggtggtggagctaataatcacaacaaacatagatataagaaagttaaatgaaaatcaattagaagcagttgaacatatagatgggccttgcatgatacttgcagggcctggttcaggtaagaccagagtaattacatatagaatagccaatatggttgtaaacaaaaatatagcaccaacaagaatcttggcaataagttttaccaaggcatcttcaatagaaatgaaaaatagagctttgaatttaagtgatgatataagacttaataaggtaacctatggtacttttcactctgtattttttaaaattctaagatactttgaaagatacaatttagacagtatatttgatgaaaagtcaaagcgaatgacaatcaaggcaatcctaaaaagtttaaatatagagaatgctgatgatgatgagaatataggacaagttataaatgaaatctcctatgtaaaaaatgaacttatggataaaaatgaatttaattcagaagtattaacaaaagatgagtttttaaaagtatacaacttatacgaagaacaaaaatctaaagttaacaaaatagattttgatgatatgcttataagaacttattatttacttttgaacaataagtctgcactagaaatggttagaaatgtgtataaatatatattgatagatgaatttcaagatataaataaagtacagtttgaagttttaaagttaatttgtagcccattaaacaatatatttgcagttggagatgaagaccaaagtatatatggatttagaggtgctagaccagattttttgcttgaatttgaacaatactttaataatactaaaaaaataatattagatataaattataggtctaaaagtgagatagtgtatactgcaaatagacttatcgacaaaaataaaaatagatatgaaaaagtcattaagtgtagtcagggggatggaggaagtgttacctacatttctccacatgattcagaggaagaagccttatatattgccaaggaaataattgacgaaatacaaaaagattatgtagagtattcagattttgcagtaatttatagaacaaatatacagtcaagagcattagtagatgtatttatggatatgaggattccatttgtagtaaaagactcagtaattacaatatatgaccattgggcaagtcaagatatactagcttatttaagaataggtattaatccaaaatcaaataaagattggttgagaattataaacaagccttttagatatatatccaaagacagtataaatatggttaaggatgaaaaagactttataacagcattaataaataagtgtaatcttcatcctaaacaagttaaaacaataaatgatttggaaatagatttaagttatttaaatactttaaatcctaaaaatgcaatatcttatattagaactagtcttgattatgatagatacgttttagattattgtagcaacagaaagataaaaactaatggacttgtagagatattaaatgaacttgagagttcagcaactaattttaatactgttacagagtttttagagcatattgatagagtaaagactgagttaacggaaaataacaagaataagcagactgagggtgtcatatttacaactatgcatagtgcaaaaggattagaatttagaaatgtttatattataggtgtaaatgaaggaacaatacctcatgaaaaatcatatgatatttgtaaggaagagaaaaaagaagaacaattagaagaagaaagaagacttatgtatgttgctattacaagagctgaagaaaagttatgtataagctctactttaaataagtatggtaagaaagttgataaatcattatttattaatgatataaaatctccaacgaaaaaagaaattgacagtattggtgtaggggataaggtataccataaaaaatttcatgaaggagaaataattaaaaaagatggaattatgtttacaataaagtttaaagatagagagcgaatcttggatttgaaaacttgtttattgaagaatataatttatactatttaatttagaatctaaatttagatagaaatataatgtattatttattatgtgcaagacaaatagatatgtgtaaaatgtattatttaacttattagaaaaagaaataaggatttaatatattatttatagttgtttagaaaaagcaacaatgtggaaaatattatttagtattattaaagaaaagcaacaatgtgaaagatattatttagtgtaatttaagaaaaagcaacaatgtgaaagatattatttagtattattaaagaaagagcaacagtgtgaaagatactatttagtattattaaagaaaaagcaacagtgtgaaagatattatttagtgtaatttaagaaaagcaacaatgtgaaagatattatttagtattgtttaagaaaaagcaacaatgtgaaagatattatttagtattatttaagaaatagctaaaaatatgaaatatactatttataattacaaaaataatatcaataaatataaacagtagtatttagataatttacaagtaaaaattattaaaaaaataaaaaacttattgacaaaaatattataaggaagtacaattgtattaacaatttaaggaaacaaatccaatgatagagaaagtagcatatatggatttacagcgagttaggggttggtgtaagcctagcaatgaagtctatgtgaagagagctctggaggagattatcagaaactttagtatgataattggtttacccgccttaagggattgagaggataagtacttacttatcaaaaagagtggtaacgcggatataattcgtctcttagctgtaaagctaagggacttttttgatttaaaaataaaaatatccatacagcttaaatgctaacagtcacaaattttgaaagtaatataagtatttatcaataagagtggtaacgcggtaaagtcgtctcttagtcattaaagactgagagactttttttgtaactcgaaacatttaagtattaaaatctgagggaaattataattaaaagagaggggtagttaaaatgaaagtatttaaaaaattattaagtttaggattagtattaggattgacattatcgctagtaggatgtagtggtggaggagaaaaaacaaagttagaacaaataaaagacaatggaaaattagttgttggtactagtgcagaatttcctccatttgaatttcataaggtagtagatggaaaagattcaataaaaggattcgatataatgttggctgaagaatttgcaaaagagcttggtgtaaaggttgaaattaaggatatgtcatttgatggattaataggtgctttaaatgcagaccaagttgatattgttcttgcaggtatgtctccaacaccagagagagaaaagagtgttgatttttcagaattatattatttaagtagaaatgcagttatagttaaagatgcagatatagacaaagtaaaaactgaagatgatttaaagaaacttagagttggagttcaagcaggaagtatccaagaagaatatgtagttaacactttaaaaatgacaactacaaaatctttaaaagcaatacctgatttaattacagaattaaaaaatggaaacatagatgcagttgttactaatgaagcagtttctttaataaatgttaaaaaatatgatggaataaaaatggcaaatactgaagttggtaaagatgtaacagaaggtatggcagcagcaatcaaaaaatctgacaataacaaagattttatagaattattaaacaaaaagataaaagaattacaagatggtaagaagatagaagaatttttaaatgaagcatctactgaagctgcttcaaattagtaagaaagttatgtgggagatgaaattatgagtttagattttagttttttaagtagatttgggacttcttttttggaaggaacaggtgtgacagtatcaatttctcttgtggcattatgctttggatttataataggtataattatctgtatggcaaaaatatcaaagagcaaagtattaagagcaatatcatcaatctatattgaggttttaagagggacaccattattagtacagatatatatagtatggtttggtttacctcaattaggaataagattccctatgttgtttggtataccaagtgaatttatagctagtgcatttgcattatcagtaaactctggtgcatacgtggcagagatacttagatcaggtatacaatcagttgataatggacaaatggaagcaagtagatcattaggattaaattattggtcaactatgagatatataataatacctcaagctataaaaaatatattaccttcattagcaaatgagtttattacacttgtaaaagaatcttcaataatatctgtaataggagttgttgagataatgcgtactgctgatatagtaaaaaatgcagcatttagagcattagagccattaatagtagcagcagcaatttactttgttataacatttactctatcaagattagttggattattagaaaagaaactatctgtgtctaactagatgagagcatgtttagcatttagggaaaacatagaatagtaaaaaggaaagtgataatatgattacaataaaaaatttaagtaaatcttttggagatttaaatgtattaaaaaatatagacttagaaatcgctaaaggcgaaataatggttatagtaggtccaagtggttctggtaaaagtacacttcttagatgtatgaatttactagaaatacctacaggtggagaaataatatttgaaggaaaaaatttggtcgataaaaaaactaatattgatgaggttagacaaaatataggtatggtgtttcaaaactttaatttattcccacataagactattttagataatataacattagcaccaattaaattaaaaaagatgactaaggaagaagcagaaaaaaaagcagaaattttgttgagtagagttggtcttttagataaaaaagattcatatccatcacaattatctggaggacaaaagcaaagaatagcaatagctagagcacttgctatggaaccagatatgatgttgtttgatgagccaacatctgctcttgacccagaaatggtaaacgaagttttggatgttataaaagaacttgctaaagaaggtatgacaatggcaattgtaactcatgagatgggatttgctaaggaagttgcagatagagttatttttatagatggaggaagtatacttgaagataatactccagaagaagttttcggaaatccaaaacatgaaagaacaaaagcatttttagcaaaagtgctataatatataaaaaggatgttattgatattagaaattcaatacatccttttttagtgatggttaatattaattttaaaattaaagttatattaatattaactttatttttacgattttttgcagaaaaaaaaagagctcggggtaagctctttttttccaccgaattaatttccgttactaatccgatttttaataaatataaaatatatccttatgaaagggtattgggaatagatatattaactaactagggttaccagggggataaccttaatttattataacaaaatgcgacacaaaaatcaatattttttttgaaataaattataaaagttatttttataacaagtaagcttataaatttaacttttatagtaaaaataagtatatgtataatataatatatttattttatataatatattattttatcatatattgtattttataatatatttttgtaaggtatagtataagtatattatattttactataaaaatttgtaataaagtgaaaaaactagcttttcatgaaataatattttataatttaagattgtctttttaataaagattaacaaaaaaaatactataattagtggtataatagttagagttgaagattttaaataaaggtaggtgtaattaagttggaaatatacttagacaatagcgcaactacaaaaccttatcaagaagttatagataaaatggtttatgcacttaatacggaatatggaaatccttcttctgtccatagaaaaggtgtagaagttgaaaaagctataaaagaagtaagacaagatatagctaaatctctaggagcgaaagaaaaggagatttattttacatcaggtggtacagagtgtaataatactataataagaggtattactagtttaaataaaaaaagaaaaaatcacataatatctactaacatagaacatccttctgttttaaatacattaaaagatttagaagaagatggttttgaagtaacttatttagaggtcggaaaagatgggaaaataaatatagaggatttaaaaaatgcgataaagtcaactacatgcttagtaagcatgatgcatgttaacaatgaaataggaactatacagccaataggtgaagttggaaagtatttgaagggtttaaaagaaaaaatttatttccatgttgatgctattcagtcatatggaaaaattaattttagaccatctaaatacaatatagattttatgagtgtaagtgcacataaatttcatggtccaaagggaattggatttatgtatataaaagaaaataatcgccttaagcctatgttaacaggtggtggtcaggaaattggaattaggtcgggaacagaaaatgtacctggaatatatggtcttggagaagctgttagaatactaaacaaagatttagatgttgttatttcgaaagtaaataacttaaaaaatatattaaaaaatgaaataattgataatatagaagatataaaaatcaattctccagaagatggagtatgtcatatattaaatgtatcatttagagggacaaaaggagaagttttacttcattacctagagcaaaaaggtatttatgtatcaactggctctgcatgttcttctaaaaagaaaggtagttacgtattaaatgctataggtcttacaaatgaagaaataaatggaacaataagatttagtttatctgatatgaatacagaagaagaaatgttagaagctgtgaaagttttgaaagaatcaatttgtgacttaaggtcaataatgaaaagaaaataaagaatactgtatagatagtgataataaattagtttaagaggtgaaatggtgtataatatattaatagtaaagtatggagaaattggagtaaaaggaaagaatagatatatatttgagaataggcttataagaaatataagaaatatgttaaaaccaattggaagatttaatgtatataaagagtatggaagaatatatgttgatttagaagactatgattatgaagaagtaattgaagaagttagaaaagtatttgggatagtgggtgtgtgccctggagtaagagctaaaaaagattatgatacattaaaagaaatagctttaaaaatgttagaagaaaaaatagaggctggatataaaacttttaaggtagagtcaagaagaggagataagtctttcgggttgacttctcaagaaatgagtatggatataggtggatacttattatcaaaggtaggagataggattaatgttgatgtaagaaatccagaagttaaaataaagtgcgaatacagagaatttcatactatggtctatagtgatactatacctggatatggtggattgccacttggaacgaatggtagagctatgtctcttttatcaggaggtatagatagtccagtagctacatggatggttgcaaaaagaggtatggaggtagaggcagttcacttccatagttatccatttacaagtgaaaggtcacaggaaaaagttaaggatttagctaaaatactggcaaaatactgtggtagagtaagacttcataaagttaacatattagaaatacaaaaagcaattggtgagaattgtaatgaagaagaagctactattctttcaagaagatttatgatgaggatagcacagagactttctgaaaaaagacattgtgatgctttaattacaggtgaaagtattgggcaggttgcatctcaaactatacaagggcttacttgtactaatgccgttgtagacttaccagtgtttagaccacttatagcaatggataaatcagatatagttgatatagccaaaaaaatagggacttttgaaacatctatagtgcctgaagaagattgttgtagtgtattttctcctagaaagcctgtcactaaacctagattagagaaaatagaaaaatctgaaacagcacttgatattgaaaaattagtacaggatgctattgacaaaatagaggtagaggatattgagttttagcatacaagttatttaattactaaattgaatattgagtatattagtagttctgtaagtatattagtagttctgttgaaaggatttatgtagacaatttattaatatatagtatttaaaaataagtactataattttatttaatgggaatgattattatgaataaaaagggttttacattaattgaattgttggtagttatatctataataggaattttagttatagtagctgttccagcgttatttagaaatatagaaaaaagtaaggcagttacatgtctttctaatagagaaaatataaagactcaaattgttattgcaatggctgaggaatcaagtaaagacaagaatgaagtcataaaagaggtattagaaaacaaagatggtaagtactttgaaacagaaccaaagtgtaagtcaggtggaatatattcagcaacgtttgatgatggttatgatggaataactggaatagaaagcattgcaaaagtgtatgttacttgtacaaaacatccagatggtattgaaatggctagggatatacatcaaagtatgaaagatttgattgcatcatttgcacaagacccttctataataccaggagcttcaaagggcaatgatgattttagaaaatatttattagacaataaatataaaaatgggtggcctacaattccagatgaatttaaggcaaaatatggattaagtaaggatacactatatatacaaccatatgcatataatcctactaaatctgatgctactgtagttgtatttgcaaataataagactggaggtaattggtatacttccctagtttacgattatgatgaaggtagatggtataaaggtaaaaatggtatttctgttgcaggtaggtcatgggatgttgacacagatagtgttaagtctgtaaaaacagagattcattctaaagagggatggggtcctttaaattaatatatcatgttttattaatctggtattgattaaactatagaaaagagcagtttctatagatgacgaataccagattttcatttatatgtataattaagatatattaaaagtatttatatttttaagtcttcacatacaagctaaagataattataataatattgtaaagaaatttaattataagattaattttctgaagatttagtatttgtactaagaaatacataaaaaggggaatagatatgaataataattttcaagacaaccaaacaataaatttaatacaaagtcgtagaagtatacgaaaatttacaacagagcaaattagtgatgagcaagtaaacacattattacactgtgcatttgcagcaccttcaggatgtaataaacagccttggcacataactgttgtgcaagaccagaaacttttaaaagagattagtgatgatactttatctaggattcatgaagtgagtaatgttgagataaataaaaactttaagttattttatggtgctccaaccgttttatttatttcttatgatgaaagtagttcatgggctccatatgatataggaatacttacagggaatataacaacagctgcacaagcactagggcttggaagttgtataataggaatggttagaggtttatttacacctgttgaacaaggggatattgaaggtcttgtgagtgtattggataaagaagatgtaaaggaatcagagtcaataaagatgaagtttgatacaaataaaaaatacagagaactacttgatataccagaagggtattctgtaccatttggtattgctgtaggtattccagatggaaatttaccaaatgctagagaggtagtttacaaagtttccagagtttaggataaagtattgcaagaaccaatcagttacttgaagaattaaaccagtaatatacaaataaattgatggaagaggaagctatttaaaaagtagtttagatttttcattgtaaaataattaaataaagaataaggtgataagtattttatttattatcttattcttttttatttttgttttgtagaatgataaaaataaggattaagtgtaataaaatagaaaacaagtatgttaattttaagtatatgctttaaaatttatccaagttaaaaatttaagatatcttttcagtataatggaaaaaatgtcaaaatattgaaatagggaaaaaatagtgatataataaaaaaaatagagaaaaaaagtaacccttagttgtaaaaaagttactatttattgaaaatttagatacttttctaaaaattatctatgttaatagttaaatttatgaacattttttgtttttatgttaggatatttcttagaaatgaaatacttcttaatttgatttgatatgtatatttttatagctattttattataaaaaaaaagaacccttttacaacaaatggaaactatgtacgtaataattaaaataaaaaatattattttatatttataaacattgacattctaattctgtagtgtaatcgtattttttattaattcttataaaatcaatgaaaataaggatatccattttaaagtacataaatttaaaaatccagaaaaatatacttaaattatgtaagcaaaagaggggttgaatcggctgaaaatgtaatactagtaaatagtacatcaatcctagataccctgtaagcaactctattttcatgtactaaaaatgtacctattttattaactgaaaagaataaattaaatgtaagtacataataagagataaaaaattaaaagcaaaaaatatttatataaataaatataaaaaatgatataatccctattaaaaaatttatagatgatgaagaaatatcaaaatcttatattataggaagaggcacttctttgccaaaatatatagaaaagcaataccaaatccaaagagaataggctgagaaaaaataaaacaaattcaagagtaatagaaaagctttatagaataaagaactgagaactctttatataataaaaaatggacttttaagagaaaatgatttaataaatgatttaacatggtgttttagcaggtgaaaataaatcaccagtaatgattgtagaaaaattactttatgaatctcaaaaaaacttagttaagagtaagagatttgataagataactaaagttggggaaatgtgtttgatgagataaaaaaattagtaaaatagtataatctaaataagaatattttgttgattaaactacactaatagtaatattgtagggggaaaagatgagagaagaatcgaactctttaagtttagaccatatagaaattttctttgaacttttatctcaaagtacagaagattatatatttttttgggatataaataggaataaatttaaaatttcttcagcaatttttgatgaatttaacttaagtaaagagatagaatctgatttagtcaattgttggagtaaaattgtttatccggatgatgttcaaatatggaaagatgatatacaagaattactacatggaaaaaaaggtgagcacaatttagaatataggttgattaataaatatgaagaaatagtatggatttcttgtagaggtaaagtttatgtgtcggatgacccaaaaactatatttctagtcgggagaataaagaatattggtgaaaaaaataaatttgattctatcacaggaacgtggaatagagaacaatttgaacatagaatgaattatcttataaaagagaaaatttataaaaatggtgctatgtttatcatggatattgataattttaaaaatataaatgaaaaatatggacattcttatggtgacaaagtattgcgtgcaattgctactgaagtattagaatatcttccaaaagatgtaagattgtataggttagatggagatgaatttgcatttttttaccctatgtgtactaaagaaactatagagaaaatatatgaaaagatacagatgtatacaaatactcagcatgaaattgaatcaaataagtactattgcacagtgactgcaggagttgctatgtatccagaagatggagataattatttagatttatttaaacatgctgatattgcattggatatagcaaaaattagtggtaaaaatagaattaagtttttttcacaagagctctatgaaaataaactaaaggtaatttcaatgcaacaaaaactaagagagtgcgttgaaaataattttaatgactttgagctgttttttcaaccccaggtaaatgctgttacaaaagaggtaataggggcagaggtacttttaagatggcattcgagtacttatggagaagtatctcctgttgaatttataccaatactagaacagagtaatttaattataccagttgggaagtggattataaaagaagctgtaaaacagtgtaaagaatggcataaaataaatccagactttaaaatatctgtaaatgtatcgtatattcagttaaaagaagatttttttagagattttatagtagaatgtttagtagagtatcaattaagacctgaatttttaattttggaattaacagagaattgttggataccagatataaatttactaaatgataaatttattagtttaaagggtataggagtatatattgcaatagatgactttggtacagggtattcatctttaaattaccttaaagaactgtctgttaatataataaaaattgaaagaagttttgttaagaatattacatataatagttatgaatatacttttcttgaatatattattaaattagctcatattataaatttaaaagtttgtgttgagggaatagagtcttatgaagagtatgatatagtaaaaagcttaggtgtagatattattcagggttttttatttggaagacctgtaagtgcctctgaattttataaatttcaactatcaaagtgatgtacataaaatgagatatatagtatataaaaatagggcaaagtggaagttttgaagtttattaaaaatttacactttaccctattttgttatgtcttctataaaggattaatatactacactaactattatatactttcactccaaatttagagattatttcactagctttttggacatcttccttagtggcatcaggaacatcttttagttcataatcgatacctaaactttcccatttgtgtattcccatagaatggtatggtagcaattcaaatctttctacatttttcaatgtagctacaaattgacctagtttttctaaattatctatatcatcagtaatgccaggaactaaaacatgtcttatccatacaggaatatttcttgattctaagtgtctagcaagttttaatgccttatccataccaacaccagtcaaatcaatagatttttcctcaaccatatgttttaaatcaagtaaaaccaaatcagtattatctaaaactgggtctatagtttctatatctacgaatccagatgtatccaagcaagtgtgtatatcattttcttttgcttttttaaataattcacttaaaaattctggttgaagagtggattcaccaccagaggcagttatacctccaccagaaaacttcataaaagaagtatacttaagagcatccgttattatttcatcaactgtgtattcttttcctgatttaatatcccatgtatccctgttatgacagtatttgcatctaagaggacacccctgaaaaaataatatatatcttattcctggtccatctacagtaccaaacgtttctatagaatgtatctttcccttaatcatagagttcacctcacaatatattttaataaccttatcaatagttataatatttgtctaaaaaaggccatcttataccagaaataattcaaatataagatagccttttatttttattttttacacagtagtaatcttagttaaagtataaaaatttaaagactaagccattttaccgtggaatgttctgtttataacatctaattgttgctctttagttaattttatgaagttaactgcatatccagatactcttatagttaattgtggatattcttctggatgttccatagcatcttctaaagtagctctatcaaatacatttacatttaagtgatgagcattttgagagaagtatccatccatcattgcagaaagattgtttattctttcagtcatatcttttcctaaagcagcaggtactatagagaaagtattagatataccatcttgagcatgttcatatggtaatttagcaactgaagataatgaagctaaagcaccattagtatctctaccatgcattgggttagcaccaggagcaaatggagcaccagctcttctaccatctggtgtattaccagttttcttaccataaacaacatttgaagttattgtaagtatagattgagttggataagaatttctataagttttattttttcttattttattcataaagctttcaactaactctacagctatactatcaactctatcatcattgtttccgtattttggataatctccttctatttcaaaatcaacagctattccttgttcatttctaatagttttaaccttagcatgttttatagcagataatgagtctgcacaaactgataacccagccataccacaagccatagttctaaatatatctctatcatgtaatgccatttctaatgcttcataagaatatttatcatgcatataatgtattacatttaaagtatttacatataatgttgctaaccaatcagtgaatggttcaaatttactcataacttcatcataatctaagtactcagaagttataggttcaaatcttggtccaacttgaacaccagatttctcatctacaccaccatttatagcgtataataaagttttagctaagttaactctagctccaaagaactgcatttgtttaccaattctcattgcagatacacaacaagctataccatagtcatctccccagtatgctctcattaaatcatcattttcatactgtactgaacttgtatctatagatactttagaacagaaatctttgaatccttgaggtaatttagttgaccatagaactgttaagtttggctctggagaaggtcctaatgtatatagagtatttaacattctaaatgagtttttagtaactaatgttctaccatctattcccatacctcctatacactcagttacccaagttgggtctccagagaataggttattgtaatcaggagttcttaggaacttaaccattcttaatttcataacaaaatggtccatatactcttgtaattcttcttctgttacgattccagcttttaaatctctttcaaagtatatatctaagaaagtagatgttctacctaaagacattgcagcaccattttggtctttaacagcacctaaataaccaaagtataaccattgtacagcttcttttgagttagttgctggttttgatatatcaaatccataagattcagccatttttttaagttcatttaaagctgatatttgctcagttatttcttctcttaatctgataacttcctcatccatgcaagaaacttctaatgatttcttttgctcatttttatcttctattaaagcatcaacaccgtatagagcaactcttctgtagtcaccaattattctacctctaccataagcatctggaagacctgttattataccagattttctagcagctctcatttctggagtataaacatcaaaaactccttggttgtgtgtttttctgtatttagtaaatatatcttttatttctgggtctaattcatatccaaaagcttcgcatgaattttcaaccatctttataccaccatatggcatgacagctctttttaaaggggcatccgtttgtaacccaactattgtttctaattctttatctaaatatcctggagcatatgcagctattccagaaacagtttttgtatcaacatctaaagtaccaccattttctctttcttttttaaataggaccattgcttcgtcccataattttttagtattttcagtggcaccagctaagaaagagtcatttccctcatatggagaatagtttaattgtataaactctctaacatttatttctttagtccatcttcctgttttaaatccttgccatgcattcattaagtatttcctccttagatttaaatgataaataatactattaaaattattttttatatacttaatttattttatatatttttttaaaaatatattttctaatataataatatcatattattcgtatcctgtatacataaaaaataaaaaattgtcgctttaaagtataaaacagattatatgttaataatgtggtgaaattatacccatatataaataaaataaaacaaataaatagctaattaaggagaaaatattttttattttttgtttaggataaataaattttattatggaaaaaagaaaaagcatacatcttcacaaattgaatatttatttaatagggggaggtgatagattgtttatcacagtggtattatttttagtaggtttcctattaattactaaaggcgcagatatctttataaattgcactgtagagataggtagaaaaacgaatatatcagaaattatacttggagctactatagttagttttgcaacaacattacctgaatttacagtgtctctacttgcttctattgatggtcatactactatgagtttaggaaatgcagttggttctataatatgtaatacaggattagcattagggttggttgtttttataagtccatttaatgtagataaaaaaatgtttttttctaagtctttactattaatagtatccgttatagttttaattttattgagtttagatggagttataacaagaggtgattcattattacttataataatattaatcttttatatggttaataattatagaagtgtcgttggaaaatctgatactaaaaatagaaatattaaaaataacactattaaagacatatctactaaaaaagggaaaaattatagaggtttttccgtattagaaattgtaaaaatactattactttttgctacaggattgataatgatgataataggttcacaaatccttatagagagtggagtaataatagctagttttttaaatatacctcagggtatagtaagtttaactataatagcacttggaacttctctgccagagatagtttcgtcgattactgctataagaaaaaatcatcatgaaatatcagtaggaaatattttgggtgcaaacatattgaatatagtatcagtaatagctgtatcagcaataccaaataacataccaatactatctcaaaatagacaattggatataccattcatgatattattattattaatagtaataataccaacacttaaatctaatagacttagtagaatacaaggtatattgatgttattcacatattttctgtacatatcaattttgtatttcatgtatattatttaactatactgtttaaaatattaattgcagaatatcctaaaaaagtatataatggataggttaagattaattgataacggagaggaataatatatgaatataacaaagtttgaagatttaccaataagtgagggaataaaaaaagctatagctgaaatggggtttgaagaaccatctcctatacaagcacagtctatacctgcgattttgtcaggtaaagacgttataggacaagctcaaactggtacgggaaaaacagctgcttttagtatccctatactagaaacaatagacccaaataatagaagtttacaagctgtagtgctttgtccaacaagagaactggcaatacaagtatcaacagaaataagaaagttagctaagtattcgcacggaataaagacattacctatatatggtggccagccaatagatagacaaataaaatctctaaagagtggtgtgcaagttgtaataggtacaccaggacgtacaatagaccatatcaatcgtaaaacattaaagatggataatgtaaaaatgattatattagatgaagcagatgaaatgctagatatgggatttagagaagatatagaaatgattttaagtaagattccagaagaaagacaaacaactttcttttcagctactatgccaagaggaattttggaattaactaagagatatcaaaaagacccagagcatataaaagttgttagaaaagaacttacagtttcaaatacaaagcaatactatatagaaactaggtcatcaaataaattagaagtattatgtagattagtagatgtatatgaccctaaactatctgttgttttctgtaatactaagagaaaagcagatgaattggtaggagatttacaagcaagaggatattttgcagatgcattacatggtgacttaaaacagactcaaagagatatagtaatggataagtttagaaatggtacaatagatatacttgttgctactgatgttgcagctagaggtatagatgttgatgatgttgaatgtgtattcaactatgacttaccacaagatgaagagtattacgttcatagaattggtagaactggtcgtgctggtagagaaggtatgtcatttacttttgtatttggaaaagaaatgagaaagatgaaagatatagaaagatatactaaatctaaactaataaagcataatataccaacaataactgatgttgaagagaaaaaagtaggtactttctttgcacaagttaaacaaactatagaagaaggtcacttaactaaacaattacaatggttagaaggtttctgtaatgatgaagattatgcaatggttgatatagctgctgcacttgtaaaactatctctaggtgaagaaatgaaagaagaaataatagaagaaaaacctagaagagagcgtggagatagaaaaggtggtactggagctaaagatggtatgattagattatttatcaatattggtagaaatcaaagagtacaagcaaaagatatagttggtgctatagctggagaagttggaataccaggtaaagtagtaggtactatagatatatatgataagtatacttttgttgaaatacctaaaaaagatgcaaaaacagtaattgaaaagatgaaagatattaagataaaaggtaataagattaatatagaaaaagcaaataagaagaaaaaataacgtatagtatacaaaactataattagaaaatatataaaataatatattggatatttaaaaagcctgatgtgttttcaaaacagatagtagataatctgtaagagttaacagcataaggcttttcttgttttatatgatattatgattttccagatcgttgtgaaaaatgtatattagttcctttttttcaaatctgatttgaaaaagagaatattaattatctatatagtttagattataataaaaaatgtaagataacaaaggggagaaaaagatgtcaatgacttatatggaccctagggtttttttgattttagaaatggtgttagaagaagacacaaatactctagaacaattttcaaatgttttgggtgttagtactaggactatcagaaactatataaaccagattaatcgagaattaaaaggtggtattgctaaaatagttaaaaatgaaaaaggtacatatagtataagaattgaggatgaaagtaaattaattgagattgtaaattttaatagaggaaagctatcaaattttataaatttaaattcacctgatgaaagaataaattatgttcttgatattttaactatgaccaacaatccaattaccatagatgatttggctgaagagatatgtataggaagaacaacattaataaaggatttaaaaaaagcagacagaattttagctgaatatgatttagaattaaaaaggaagccaaatataggtatgattttagttggtgaagaaatggatataagattattaatccttgatagattgtatgaaaattatattgatgtcttggaaaacgttaatcagataaatttagttaaagattatgatattgaatgtcttagagatgaattaaaaaagttgtttaaaaaagaagaactctacataacagaacaggtcttgagagatgttgaaagatatataatcatgtctgtcttaagaaatctaaatgggtacaaatttgaaaagatagataagagatttgaagtgataagatgttcagatgaatatactttaggattaaagctcaaagctttattggaaaagatatttaatatagttttaaatgaaaaagaaaccatatttttgacaatgccattaataggtagaaaagctcctagtacaaaattagcacttagcagtataaagataaatgatagcgtaaaggaagttgtagatgaagtaactagttttttattagagacctcagggattgattttaaagaagataaaaagcttatagaaaatttggaatatcacttgtattttgcacttaatagaatgagattcaacataagggtaaaaaatcctcttttacaagaaataaaggaaagatatacatttccatatagtgttgcaaagatagctgcaatgataattgaggaaaagtttgacttgaaaatatgtgaccacgaaataggatatatagcattacattttggaagttattttgaaaaaaattcaagaaaagttctaaatgtaaatagggtagctgttgtttgtggaacaggtcttgggactgcacaacttattagaataaagataggaaaaatacttggagaaagtgtagaagtaaatactttttctgatatagaagctaaagctaatttagatttattaaagtattatgatttagtatttacaacagtagatttcaaaacagacttagatgttccaatttttagagtaaatgcgttatttaatgaagaaagtataaagaaagagatagaaaatgcaatacttttgaaaaatagtataaatcttaagtctataaaaaagattgaaaaaaatatcccttttataggtaaattaattgaagaggataagttctttatattgaataagagtacgtttatggaaaatttagaagatatgttagaaaaattagttcataaaggaattattgatatagagttcaaaaaaaaggtattaaaaagagaaaagaaatcttcaacagcattagataattatatagcattgcctcactcagttaatactaatggggaaaatctttatctgtcatttggaatattagaaaaaccagtggtttgggatacaaaggaaattagaataataatattgatgataattccagataagaatgtagatagtacagacctgataataaaaagttatgaagaagtacttgaagtagggagagataaaaaaatgatagaagaacttgctaaagtaaaatcatttgatgaattttataaaataattaccaagaggaggtaataatatggacccagtaatttttattatagcatcacttattacagtgtatttattaaatatttttcttggatacttacagcttaaagattttaataaaaattatattgaactaaaaagaaaaggaagagtggcaataggcagaaaaaaaggaagaatttcatcaggtacaattgtgttgatacttataaatgatgatggtgtgattgtcgaaactagaaaaatgcaaggtgttacagtattggcaagagtaaagtcatttgaaggtttggtaggaaagagcttagagtacatagaaaaatcagatttaactgtttacaataaactacttaaaaaagcaatactagatgcagtcaaacagtacataacatttgagaaaaataaatgtgaagatacaaataatctgagtactgatgaagagtgtaggatggaagtagtttaaaaaaatatatttataaggaggagttaatatgacgcaattttttcaagtattagcaagtggtgcagatagttttatgaatttatttagggcaggtgggcaacaatttgtaggttttgtaacagatatagtaccacttttagtagcattattagttacaatgaatgcaattatcaactttattggtacagatagagtcgagagacttgcaaaaaaatgttctgcaaatatatttactagatatttgatattaccagtccttggtacatttgtatttgcaaacccaatgacactatcactaggaagattcttgccagaaaagtttaaacctagttactttgcagcagcaagcttttcatgccatacaatgaatggattattcccacatatcaatccaggtgaactatttatatatctaggaattgcaaatggtataacaactttgggattctcaacagcagatttagcagttagatatttgttagtgggtatagttgcaaactttattaaaggtgtagttactgactatacaacaaaatttgtagagaaacaacaaggaatagcattaaattcagatataaagattggataattactttaaggtataaataaatttttcaaataaaaagatagtgtatagaggaggataaattatatggcatttaacaaagttaaaatagtaaaaggttctggaggatggggtggaccattgataatagaaccaacagaaaagaagaataaggtagtatatgtgactgggggagcaaagccagaaactgcagtaaaaatagctgaacttacaggatgtgagttaatagatggattttcacagggtgttaaagatgatgaaatcgcatgtgtaataataaattgtggtggaacattgagatgtggtatatatcctcaaaagaaaataccgactataaatataatgaaaacaggaaaaagtggaccattagcaatgtttataaaagaagatatatatgtttcaggggtaaaaccaacaaatgtagagcagttataattgaggtagtaggagggaagaaatatggcttatgatactaaaaagaagataagtgagcagagtcaaggaattgttgcaaaaataggtatagcactaggaaatgtgacaagtactctttttcaagctggtagggatactatagatacattaatacatactatactgccttttatggctttcgttgcagtcctaataggtataataaatcaatcaggtataggaaattgggtagccaatttacttactccattaatcggaaatgttggaggtttagttgtcttatcaataatatgttcatttccgttgttgtctccgtttcttggaccaggagctgttatagctcagatagtgggggtattggttggtacagaaataggaaaaggaaatattccaccaagtttagcattaccagcattgtttgcaataaactcacaagcagcttgtgactttataccagtaggtcttggtcttgcagaagctgaacctgatacagttcaagtaggagttccgtcagttttatattctagatttttaacaggtgcaccaactgttctattagcatggttagcaagctttgggttatataaatagaagaatactttataaataattagagagaggttcagttgatatggaattaatatacagtactcaaataaataaaataggagataatgcaaatgaatttttacaacataatatgtttgtaactttcaaagataatgctcctcaagagttagaaaattactgttatatacattctgaaaataatttagtaaaagaaatacttacgaatgatgtgttatcaataaataatgttgattacaaaattacttctgttggtgagttagtaaaccaaaatctttcagaattaggtcatataacatttaagtttacaggtgaaaaagatggagcaattggagggaccttatatcttgaagaaaaagaaatagcacctattggcgtaggtactatactaaaaataattagaaaataaaatttaaaacgaatctaatcatattataagtaaattatagataaaagtcaatttaactaatcaagttaacttttaatgtgataaaaaaggggaaatgaaaatgagaaaagtggctttagttgttggaggaggaagaagtttaggtgaatatttatctaaacatttagctaaagtaggttatgatgttgctattgcagatttaaatgaagacaacgcaaaaaaagtagctgaagaaatagaaactgaatttggttgtaaatctgtaggatatggttgtaatgccatagatgaaagacaggttataagcactgttaaagctattgaaaatgattttgatagaatagatttattagtgtacaatgcaggagtggctgtaagtaaaaaaataactgattttggatacaaagattttaaatttattgtagacgtaaatttaaatgggtactttctatttgcaagagaagtatctaaagtcatgatagcaaaaggtattgagggtagaatcatacagataaattcaaaatcaggtagagtgggaagcaagcataattcaggatattcagcaggtaaatttgctggagtaggacttactcaaagtttagcgctagatttggcagaacataagataactgtaaatgcactgatgctcggtaatttacttgattctgatatgtttgaaagtttaattcctcaatatgcagtaaaattgggaatacctgaatcagaagtcaagcaagtttatatagataaagtacctttaaaaagagggtgtagatttatagatgttgcaaatatgcttacattttatgcttcaaaggaagctgaatactgtactggtcaatctataaatattactggtggacaagttatgtaaggtttttatggagtgtctcaagatgaactctttagttcatgaggcactttttttgtataaaattaaatatattttcatcatttaaacaatgaaaaagaggtttatctttattttgagatagcctcatttttgtaattaagaaacatagtgtttaagtaaacatataagattgttagttttttaaaagagaattttttaataatattatatttatgaagtatttttaaacttaatttgattaaaaaatagctacgcacacttgtgactttagtcatgagttagtagctaaattagtcagcatatagggaaacttatatgtagagataggatagaacctatccaatactacttgaattgctaaaaacccctaaagctaaccaaactaaaacataagggtgaaataaacctaagtgtgaaagttacgaaagtagaaaaaattggttagatggtataaggttaaatcctaagtactttaaaatgggcaatcagcaggtaaactccgaataggagaaacttcaacgactattcctcttgagggaagtacactacaagttatcggtagtggaagtgggtagaccttaacggataatgccgaaggataagatatagtctgtgcttgcatgaaagtgtaagaagttcataagagaactgcataggtagtagcgaacttatgtgaacgacaacctcaaaaatgataaaagttaagacttacggttcttatatatgttatttaaaaataaatataaaaaaccttcaaaatacttgttttaagtaattgcatattttaatattatgataggtgatgaaaaatggaagttactcatggtagaggatatgcatataatatgtcaaatatagacatccagtattatggggagacatctttggaatcctagttatttcgttgctactgtatcatgctactgtatcagaaaatacagaggagcagataagaaaatatattaataatcagaaaaaacaagtaaagtgaggtgatagtagtggaaaaagcttataagtttagaatgtatccaaataaaaaacagcaagagttaattaacaaaacttttggatgttgtagatttgtatataataagtatcttgctaaaagaatagaagtttataaaaatgctaaagaaacttttacttataaacagtgtagttctgatttgaccaatttaaaaaaagaattaaattggcttaaagaacctgacaaattttcactacaaaacgccttaaaagatttagataatgcatataaaaaattctttaaagaaaaagcaggatttcctaaatttaaatcaaagaaaattaatagattttcatataaaactaacttcacaaatggaaacattatgtattgtggtcaacatataaaactacctaaacttgatatggttaagataagggataaacaagtacctaaagggagaatacttaatgctactatatctaaagaaccaagtggtagatattatgtatcattatgttgtactgatgtagatattgaagcatttgaaaatactaataatcagataggtttagatttaggaattaaagaattttgtatctcaagttgtggagaatttatagaaaatcctaagtatcttaagaagtcattaaacaaacttgctaaattacaaagagaattatcgagaaaaacaatcggtagtttaaatagaaataaagcaagattaaaagttgcaagacttcaagaacatatagctaatcaaagaaatgattttctacaaaaactatctactaaactaataaaagataacgatattatttgcatagaagatttacaagtaaagaatatgattagaaatcgtaaactatctcgcttaatttctgatgtgtcatggtcagaatttattcgtcaattagaatacaaggctaattggtatggtagacaaattgtaaaggtaggtaaattctttgcaagttcacaaatatgcaataaatgtgggtataaaaacgaggaagttaaggatttaaatataagagaatggatttgtcctagttgtaatgaaactcacgatagagatataaatgcaagtataaatatattaaaagaaggattaagattaataacaattcaaaataaataacttatgtaagaaccgtaggaactacggggatagcctgtggagaattagtaagacatattttagtatgcaaaattctgtgaagcaggaacactgtgactttagtcatgggaggttcagaaaatatagctatgttttatatactgtagttttgaacatagaaagtttaataaattatagtatatattaatttttaataaggtaagaaagtagaaagaaggatattttatggatataataaaaaaattaagtcatggatgtacattagattgtcatgattgttgtaaattcaatgtttatactaaagaaaataatgtagtaaaaattgaaggagataaaaatcatccttatacaaaaggttttatatgcaaaaaagggatggctcatttagatagattaaatcataaagatagaataaagactcctatgcttaaagttgatggagtatggaaagagatttcttttgataaggctatagaaataatggcagaaaagcttacatactataaagaaaagtatacatcaaagtctgtcatgcattatgaccaatatggaagtgggtctgtgctaaaatacataggagatatattttttaatttttatggaggtgttagcagacataagggtggtccctgttggagtgcagggatgcatgctcaaaaatatgattttggagtagctaagagtcatgctatagaagatatgttaaatagtaaaagtatatttgtgtggggaaaaaatccagcatatactacaattcatactatgcaaataattaaaaaagctaaagaaaaagggataaagatagtagtgattgaccccatatatacaaaaacagctcaaatagcagataagtatgtacaggtaaatcctggaacagatggagctttagctatagctatggcaaaaattatagtagaagataaattatatgatgaagaatatataaactcgtatgttattggttttgaagaatataaaaaatatttatcttcattggaattaagttttttaattgatgaatgtggtgttaaagagaatgatataagagagttagtggatttatatactaacaaatattcaagtataaatgttggatatgggcttcaaaaatataaaaatggtggaaacacaataagagcgatagatgctttaggtgctataactggtcaaataggatttagtggtggaggggtaaactatgctaataaagtttatccaagtgttataaattctgacccttacaatagccaatcatatggtgaagatagggagttttatgtaagtaatatcagtaaatttatagaagaatctttaaaaaatacatcaaataaagtaaattatgcatcagatgaacttgatacaacatcaaataaagtaaattacatatcagatgaacttgatacaacatcaaataaagtaaattatgtatcagatgaacttgatacaacatcaaataaagtaaactatgtatcagatgaacttggtatggcattacataaagtaaattgtgtatcagatgaacttgatatgacatcaaataaagtaaattatgtattagatgaacttgatataacatcaaataaaacagattatatatcaaatgaattgtataatttatctaataagtcaatcaaagataatattcctataaagatggctgtgataactaaaagtaatatgctgaatcaactgccagatttagtagaattggagagggtgttttcaaaaattaaatttaaagtatgttttgatatgtttatgactgatacagctactttatgtgacatgtttataccgtgtacaaatacactagagagtgaagatataatttatagctcaatgaccaatccatatataacctataatgaaagagctgtaaagccagcacataaattgatggatgaatattatttctttatggagctagctaaaaaaatgggattaaatgattatccttttgtagaaaagagaacttatttagaaaaagtgattgaaccacttaagcgttttgacaaaaatctggatatagaaaaacttaaaaacaattactttactatacataaccttgttgcttgggaagataagaagtttgagactccatctggaaaatacgagctttattcagaaagtataaaaaacttgggaataagtccaacacctgtatatataagcaataaatataaagaaatagaagataaaaatatttcttttagattattaactaatcatcatgcagatactttatttagtcagcattttatggacaaaaaatctatagctcaagcatatataaatcagagaatggctaaaaaagtaggtattgaggacaaagatattgtgatattgaggtcaaaaaaggcaaaaataaatgtacaaataaatatagatgatggagtaggtaattatatagtaaaaatgtatgttggttggtggaagaaacatggaaatcctaatagtttaacagacactggtatatcagattttggaggtcaggtaacatataatgaaagtatggtagaaataatacgacaaaactagttaaatttcattgaaggaataaaaatataattatagaattgattaaaagttactatttttacaaaactattgaaggagggatttttgatggtaaattattccttagaacataagaatctatacatagaatttatgtgctcagaactagaccaccatgtagccaatgaaataagggaagaaatagataacttattaagtgtaaatcaagtaaaaaatgttgtatttaattttgaaaatattaattttatggattcttcaggtataggcgtcatcataggtagatataaaaagatttctaatgaagggggacgagtttcagtaattaatataagttcacgagttaagaagatttttgatttatctgggttaaataaaattattggcatttatgatacgtatgaagaagctctaagttctttgtagggaggagtatgtgatgaataatattatggaagttaaattttcggcaatatctgaaaatgaaagtttagcaagagttatagtagcatcctttgcagctaagttagacccaacagtagatgagttagtagatataaaaactgctgtctctgaggctgttacgaatgctataatacatggatatgaagaagacagttctaagtttgttttcttaagatgtgagatagaaggaaatactataaagattatagttgaagatgaagggtatggaatagaaaatgtggagaaggcaatggaaccactttatacatcaaaaccagaacttgatagatcaggaatgggattcacagtaatgaaaagctttatggacgatgtagaggtaagttctgtaaaagataatgggactagaattgaaatgactaaaaaaataaatgtgcctaaataaagtccaaaagtgaggttttattatggaagtaactgttgccagagaagaaaaaaaacctcttcttagtcatgaagagactctagaacttattgaaaaagttcaaaatggagatgaagaggcaaaagaaatattaatatcaagcaatttaggtctagttaggagcgttgtatctagatttttaaatataggatatgatagagaagatttatttcagttaggttctataggcttaataaaatcaatatataaatttgacccaaaatttaatgtaaaattctctacttatgcagtaccaatgattttaggtgaaataaagagatacttaagagatgatggtatgataaaagtatcaaggtcgttaaagcaaatagctgtaaaggcaaagatggaaagtgaagctttaactaaaaaattaggtagagagccaagtatagaagaattagctaaagcaatagatgtagaaaaagaagatttagtaatggctatggaagctaatttcaatgttgagtatttgcaaggagttattcatgaagaggaaggttctccaatatgccttattgataaaataagcatgaaaggagaaagtgaagaagaaaaagtagtggataacatattgttaaaagacatacttggaagactggataagagagagcgtcaaataatagttctcagatactttgaagacatgactcaaagtgaaataggagagatgctcaatatatcacaagttcaagtatctaggatagagaagaaagtattgtctaagttaaaagaatatatatcgtgataatacttatgatatgtagaataacaaaatataataaatatattactaaaataaaatgtaataactttttatgttaagtttttaaattattaaaagatactaaaataataaaaagcattaaaaaagtaaaaatataaaaacaaggtgtctttatggaaaaatagattttttctttattaggcatcttttttattttttgaccaaactttagatagtcaaaataaataataggtttatttttttaaaattaacaaataatactttagagaggtgtttagtatggataaaaattataaaaaatatgtagaccaaataagcccaaaacctacatatttaaaaaactatacacttgcatttattgtaggtggaattatttgtatgatagggcaagcaataaatgatttgtatatgaaagttggaggtcttgataaactaggtgctagttctgcaacatcaataacattaatatttataggggcatttttaactggattaggagtttacgacctaataggaaaaagagctggagctggttctataattccaataacaggttttgctaactcaatagtatctccagcaatggagtataaaagagaaggctatgtattaggtgtaggtgcaaacttatttaaaattgcaggaccagttttagtttatggtataggttcttctattttatgtggaattatttattatatttttaagatgttttagatgatttttatttaatttaaattttattaattatgaagaaggtataaaatctgaaaatagctactaaagtaactaattgaaaaataattgtgcagatttaattaatattaaaaatttgaatagtaaaatgcaaaattaaaaaggtgtgaaaatatgaaaaataaaagaattggaaaaagaacagtcaagttagaaaataaaccaaccataatatcaactggaactatagtgggtcctaaggaaggtgaaggaccactaaaggactattttgatatgattatgactgacgatttatatggtgaaaagacttgggaattagctgaaagtaaaatggtagagactgcatcccaacaagctatccaaaaggcaggtaaaaaattgtcagatgtaaattatatgctaggtggcgatttaataaatcaaatagtgccagcatcatttgcagcaagagaactggctattccatttttaggtatatatggagcttgttctacaatggcagaaggtctttgtataggttctatgcttatagatggtggttttgctgatttagtactgtcaggtacatcaagtcactattgtacagcagaaagacaatttagattcccacttgaacttggaaatcaaaaaccaatgacagctcagtggacagttacaggagcaggaagtgtattattagctcctaatggagacggtccaaaagtaaagtatgttactgttggtaaagtaatagatgagggtattgatgatggtaataatatgggaccagctatggctccagcagcaatagatactatctactcttactttgaagatactaatgatgacccaaatagctttgatataattgctactggagatttaggtactcttggaaaacagatagcagaagactttctaaaagaaaaaggtgtagatatatcaaaagtttatactgactgtggtatagagatgtttaaccttaaagaacaagatgtccactgtggtggaagtggatgtgggtgttcagctacagtgtttgcaggatatatatatgataagttgagaaaaaaagaatttaacaaagtaatgcttgtatcaacaggagcactactttcaccgacaagtacactacaaaagcagacaataccatgtgttgcacatgcagtagtaatagtaaatgagtaggaagtgatataatatgttaatggactatgtaagagtatttattgtaggtggaattatatgtttaatagcccaagtaatgatggattatttcaaaatgcaaactccatatgttatggtaacgtatgtaacaactggtgtagttttaacttttctaggactttatgagccattagttaagtttgcagcagcaggtgcaacagttcctataataggatttggatattcacttgctacaggagtaataaaatcaattcaaagtgatggttttttaggtatttttttaggaggtacaactgctacagctggtggaatagcagcagctatattctttggatatattatgtcagtagtatttactccaaaagcaaaaccataaatctttattaaaagaataataagtttttgaaataataactttttataaagcaggtggatatcttttagattccacctattttttatataaagaagcgtttacataattgaagttgacaattatttacaacatagtgtagtattatattatcaaaataaaatgaagtgaagtaggggataaagatggtaactattaaagatattgcaaggaatctaggtatcagttattcaactgtttctaggtgcttaaacaataatcctaatgtatctgaaaaaacaaaaaagaaagtagtagaagaggcaaatagactagggttccattttaatgtaaatgcaagaaatttagcaaaaaaagaaactaacaggataggggtaatcttttcaaataattttaatcatcaagatactagaaagttttttagtgatataatggatagttctataaattctattgagactaataaatacgattttataatacagcctaataataacattagtggtgatagtaatgtatataaaatggtaaatggacaaatggttgatggattagtaattgtgtctcaatcaataaaaaaagaagagtatgattttttaaaagacaataattttccacatgtatttatatattttaaaccatcttttgtaggagaagtagacaatttcttttgggacgataacgtgtatggaggttatatagctaccaagcatttaattgaccatggtcataaagacataataacagtaacttcagatgataggagttcaaaaatgcatgaagatagaactaagggatatttaaatgctatggaagaggcaaatttaaagaccgaagtcattaaatctaaaatggattttgaatctcaagttgaatttttagaaaaatatattgataaaataaaaaaagcttcagctatatttgtacaacaagatgtacctgcgatttctataatacaagagttaaaaactacttatggtataaatgtaccagaagatatttccataatagggtataataatattgaattaatatcatattttaggtcgcatttatcaacaatagatgacccaagagagcaagttataaaaaatggagtagatagtttagtaaatataataaataaaaagagtacagaacacattccaagaaaattatatccaaggttaataatacgaaatagcgttaaaagaataaagtagtaagcttttaagtatcaaaagtttattaaaaatattatagattatgtgaagttttttaacaaacaatataaataaaaattaaaaggagtaggtgtatataagtacattgtactcctttatttattgagatagtttttataatatgaatgaataattttattcaattatttgaaaatccgttattttaacaatataaattaataaattatttgtattttatatcatgaatctataatatttttttgattcataactaaaagtatataaaaatgatgaataaatatatattatacattatcaatgataggttatataataaaatcactaacaattatattataagaaaattataaaaattacaaggaggtatagaaatgaaagaaaaagcagggattagaaatgccataatagcagcctttataatcacaatattggcagaattaattggacctatttcatttaaagttatgggaataaatgtaactttacttagtatactatgggctatattcataggaatggctgtttctcctcatttattagggagagttataccagccttaaaaaagtttataggggataatgaaataaatgtatctccatatttattatctttgacactatatccattaggaataatgtttggaattaatgcagggcctaaagttggtatattacttcaagcaggaccagcacttttattacaagaatttggtcatatgggtacaatgttgatagcattacctgttggagtagcattaggtcttggaagaagtgcattaggtggtactttttcattatgtcgtgacacagcactaggcattattggagataagtatggattaaactcaccagaaggtataggaacactaggaacttacataagtggtagtatatttggaacattattattttcatttttagcaccagtgggtgtacttttaggatttcatccatatgctttagcaatggcatcaggaatgggtagtggttcaatgatgggagctgcaacagcatcattaatgaatacggttccacaaatgtcagagcagattttagcatattcagctactagtggattgattacagctgttactggaatatatatagaattattcttatctttaccagtagccaactactattatagcaaagtagctccagttattgaaagatttagaggaagaaaaacaagaagaacaagtaataaattgtaaaggaggatatatatatggaaaaaacttttaagactattatggagcagataaaaatagtattgtttatatatattattacttgctttggacaaatgatagcacttaagactcaggctcaagatttgttgattggaagtatatctggatttttgttggtgataattgctattataataaagaattttgttaaaaaacctaatttaccaggttttgcatgggctacattagttgcattcgttttatcgcttccaatatctccagtgggggatatcatagcaacaaatgtagggaaaatcaattttatgtctacagtaacaccattattagcttttgcaggaatctctgtaggtaaccaattagatatattaaagactttgagttggaagttagtagttatatcatttatagttatgacatctacttactttggttctgcttttatatctcaaacagttttaagattaaatggaatgctttaaggaggtagtaaatatgaatgaattaaaagcaaaaattaaagaggaaataaagttattatctgaagagaaaaagacatcatttgaaaaagtttctgactatttattttcaaatccagaattagcatttgaggagtataagtcacaaaaagcattatgtgatttgttagaagaaaatgaatttaatgtaactaaaggtgtaggaggattagaaacatcttttgaagctgtgtattcaaatggaactaatgggaaaacagttgcttttctagctgaatatgatgcacttccaggaatgggacatgcatgtgggcacaatatcatagggacaagttctgttggtgcaggtatcatattaaaagaaatcatgaaaaaacataatatagaagggactgtaaaggtttttggaacacctgcagaagaaagagtaggtggaaaaataactatgattaaagaaggtgtatttaataatgtagatgctgcattaatcttacatccaagtgatgcttcaatgcctgatgatatatcatttgctcaagttaatttaaaatttgattttactggtaaggcatcacatgctgctgcttttccttgggaagggaaaagtgccttaagtggagtaatagcactatttaacagtgtaaatagcatgagattacatcttaaagattatgcaagagtacatggaattataactgatggaggtagcatacataatataattcctgaaaaatctacagctatatttaatgtaagagccttaagcatagaatatttaaatgagatttgtgaaatgcttaaaaattgtgctaaaggagctgcaatttctactggaactaatgtagaaatagttcaattagatgaaatatacaaagagattaagaatgattctgaattagtgaatatagttagacaaaattttgaagttttgggtgaagactatgttgaaagagatttaagtcaaggtataggttcaactgatacaggaaatttaactcatgagatacctgcaatacaagcatatataaaattaaaagaaaatactgcaactcatacagatgaatttgctgttgcagctggtggtgaagaaggcaaagtagcacttataaaagcaattaaggtgctagcaatgtgtggagtagatattttgtatagtaaataatatataattttaaaatatattaagaaaggaaatcggattagacatgatattaaaacaagtaatagaggtttatgacattttagataaagcaaatgctaatggggaagaagtaaaaacttacttacaaggttatggtgaagtagatgtaactgtaaaagaattgtcttcaagtaaaggttcaacagatttagtaaagcttacaattcctgggaaaaatggaaaattaaaaggtggagatgctcctactcttggtattttaggtagattaggagggattggagcaagaccagaagttataggttttgtctcagatggtgatggagcattggtagcaattgcagtggctgctaaacttttggatatgcaacgaaaaggggacatattagatggtgatgttgtaatttcaactcatatttgcccagatgctccaactaaagaacactatcctactccttttatggattctccaattgatatgatgactatgaatgaaaatgaagttgatagtagttgtgatgcaatactttctatagatactactaaaggaaatagagtaatcaatactagaggatttgcaatatcgccaactgttaaagaaggctacatattaaaaactagtgataaccttttagatattatgcagactgtaacagggaaatctccatttgtattccctttgtctattcaagatataacaccatatggaaacaatctgtatcacttaaatagtattttacaaccagcagtagctacagatgcaccaatagtaggagtagcaattacaacagagatgcctgttgctggatgtgctacaggtgcaactaattttagtgatttagattcagctgggagatttgcaattgaagttgccaagctatttggtagaaataagtgtgatttctatgataaagaagagtgggaaatgcttattaagagatatggcaaattaaatagatttcaaacatttggtatacagtaattagaaaaatattaagtttatataatttgtgatacaactatttaagaagatataaacaattaggaataaaagtaagaataaagcacttagttaaaaactttaaaaaaaaatatttatttgtttatataaaaaggaggattctggttattgggattctcttttttatgaatacaaataatatattgtaattataaaaaaaggagcgtttcaaagtgatttttttaatcaccttgagacaactccttatattttttatttaaattctattttttattgactgtatagctattttcaccatcataaggtggcatgaccttgaacagcgtggttttgtaaagttgggcaccacaaaacaaaaaatcaacaagcccttgtgtggtctgctgacgtgtttactatactatactttcccaaaaaccgcaagcactatgggaggctataaggcggcgaccattcaggggcgatcccctcgaaaccgggatagggttcccatgtgggacataataaagagcgccccggaggtatcaactaccatccggggcgctctttattatgtcccgtgggaaccatgcccacgaagcagggcgtacaacggacagataggtcctaccctcctgacagactggaatctcaatcccatcgaaaacaatcataacaatcatggcaagattatatacactcctgtaaaatatttttgtgtgtaccatgaagtactgcttgccactattgagaacggataaaagggaagtacgtattataccaataaggtgaacgaaacaaaatactcatttgataaagttaaataaacctgtcggaaccccaccaatccggcaagagctcactcaatttaacagttttttctgtttcgacattaactaaaatctcaatacaagcactatccttatcaagttgcattaaatattcacgacaagcaccacatggtgagccaacactcccattgctcatcacacaaactaatttagtaattttactttcgccatttgttatcatattggcgatagcatttctttctgcacacattcccaatgtacaggctgtatcaatacacacgccagtataaacatttccgctgtcggtaaggattgctgcggcaaccccaccagcatcgataaaaggtgaaattgtgcgtggatttaattttcccctagcattattataaagttccttccatttcatcaggttgatcctcctgttgtatccatataaataatcttttatacgccttttccgcctaaggcacacaacacattactcgcttttttcattctaatattcgtgcgtgaaaatgtcaaacggtttacttcgtttcattacttcatactgctgttcataaccctgtttgttcacttgggcaccattcgagcaccaatttacccgtttcagggttgtagcgaacacagcagaaatgctcatttcatgggcttttctggctagaaaaaaaattttatcgctgccagatatttactattttttattaagttgctggagttccaccaccatcaggaggagtagtagagccaccaccattatttccaccattatcaggaggagtagtagagccaccaccattgtttccgccattatcaggaggagtagtagagccaccaccattgtttccgccattatcaggaggagtagtagagccaccaccattgtttccgccattatcaggaggagtagaaccgccaccattatcacctgtgttattattgttattattattttcttctggttggttattgtctggtttttttgtatcttcagatgatggttgagaacttactttagtaggagcagtaccttcaataaatgctgctttagagccagaagattgctttcctccatcctctaaattaatttttgtaaaatatacatttttaggaacttcaaattcagtaaccgttaaattagcatgtattttttccataattttttcccatagttttgcagtactagtacttccatgtggtacttctctacgttttatagtgttaccagaatcatcttttctaccagcatcatctccaatataagttgcaccaacataataaggagtgtaaccgacaaaccaagcatcatatgcactatttgtagtacctgttttacctgctacaggcattccctttggaagtgtagcaacaccaccagtaccttcagtaattacgctttctaacatatctgtaacaacataagctacttcagggtctacaactttatgttcttcaggagcatttttaactaataattgaccatcaaaggtagttatagtagtaaaaatagaaggttctacataaacaccttgatttgccaatgtaccataagcagcagccatttgaagtggagtaataccattcgccataccacctagtgtcaatgatgggaattttctatcacttgcttcagatgaacctgagtgattattctttaaagttgttataccaaagttctttaagtaatccatcattatatctacacattcatcataagagtctccaagcatttcagcagttttgacagctatcgtgtttgaagatttagcaagtgctttacgtaaactcatagaaccatgaccagcagtagtagttcttggattccatttattattttcttcaaacttatatcctcctcgagaatcacttagagcagttgattgtgttatttttagggtatcaatagcaggtgtatatattgctaaaggttttatagaagaacctggctgatgagggttagtagcacgattcaaagtttttctaccacttatatttcttcctccagctagtgctcttatttcaccatttttataatctaagattaccattgcagcttgtggttggctaactccatcagggccgaccatatgtcctgggaaattgctatttctatcaaattcttcttctaaagcatcttgcattttagggtctatagttgtgtttacaattagaccaccattgtagaataagttttgagcttcatcatttgtatgtccttgttccattaaagcatttataacttcactttcgataaggtcttctacagatgaagaaactttatctgatgattgaggcaattttatttctattttagctttgattgcttcatcatattcactttgttttatatatttcaattctaacattttctttaaaacaatttcttgtctttttttagcttcagggttacttacagcctttctaacaactaatgtacctgcttttaattgtctataagtatcattagatataagctcccaagattttattttttcaatcatatcaaagtccacttgagtagggtcatctaaatcatcatcagttgtgttaacaaaaaataataatttattttctaaatcctccttagtttcatttccctctaacttagaagttttataggctgaaaatcttgatggatttttagttgaaccagcaagaagtgctgactctgctagagtgaggtcagctgcagacttatcaaaataaccacgtgcaccagcctcagcacctgctagacctctaccaacgaagaagttatttaaataagtttctagtattttatctttacttactgttttactcatctcatgtgcatagtaaatatcctttattttacgaggtatagtttgctgttcagttgttaacagcattttggatacctgcataggaatagtactaccaccttgcttagtacctgtaagggtctttaatactgacctaaataaacctttaatatcgacacccttatgctcataaaaacgctcatcttctattgcaattacagcatgttgaagataaggggaaatcttatctaatggaacgggtgtctttttatttacacttggagctgtagacaatgtttttccattagcgtatttaatagtagttgtttggttcgtctgtttatctaaaacagcttctgtaactggagttacatctcttagtgacgcaaatactagaccagcagtacctgctgtaccaacaactagtaaaactaaaaatactatcccaaatactcttagttttttaaatttatcgctttttttagattttttcttgttttttgttgaacgagtcttgttagctgaagttctattaattggtttatttgtattaccagatgagctaactttttttctcctgattttatttccatttttatcattatcgttattcataagattttaacctccttacttaatgcaatattataacacaaataggagtagttttgtaattaatagaaaaaatgaatttgctataatattctgtacattgtatatgtataaacgtaatatattaaaaagtctatatttttattttatttatttttgacaaatattataaaaattatgccaaagctacatataaataaataggaggggataattttgaatagaatagtagatagaaaaacaaaaaatgaatttagaaaaatcatagctatttttttagtaattcttttcttgtctgtatttataggcagttttatatatatagataaaactttaagaccgacaataacagttttagcagagactaaagctcttgaactagcaaataggtcgataaataaagctgttgctgagatggtagaaggaaaaataaattatgaagatttaatggatatacaacttgataataatggtaaaataactatgatacaagcaaacactataatgatgaatgaaattgcatctgcaatagctttagaaatacaagatgaattaaaaaaggataagacagcaagttcttacatacctataggaacagcattaggaagtcctatattagctaaatacggtcctaaacttgaagtgtctattgaacctataggaacagtatcagtaaactttaaaacggaatttgagtcttcaggtataaatcaaactagacatagaatatatttagaagctcaaacacaagttaaagtagtaataccacttataacttcaacaaaacaaattaaagctcaaatacctatttgtgaaactataatagtaggtgatgttccagaaagttatgtaaatattccagaaaaaaatctaggaaatgttttacctaacactggaaagaataccaacaagtaatataaagttgtatatttttaaataaattcaaaataatagtttataaataaaatttttggaaataatattaatataattttaataaaaatttatattttatactatgtaaaatatctaatatatttggtctgtaggttaaataaaagtacctttagaccaaatatattattaataacttaataacatcttaaaacttatttatttatattatttacaacatccatttaataaatacaccataacctacagctgggtcattttcaattgcatgtgacactgctccgattattttattatcttgaactattggagtaccactcataccttgtacaataccaccagtttgagctaaaagctttttatctgtaattttaattttaaaacttttactttctggatgtttttggttttctatatctataatttcaatattatattttttacacttattaaagttatcttgtaaaattatttgagcttttcctaatttaacttcatctaaagatgctactttatatttttttaaattggaaatatcaaagttattaatttgacctcttattccaaaatcagtattttctgtaaagctaccaataatattttctcgttttgcatttatacatccaacactacctttataagatttttctatattaaggtgcttagttgtagaaattgaacctgttttaataggtatttttcttgcattaccaacacttattggatgacctacagctccaaactctgatgtatctggattgatatacgttaaagtagcaaatccagaaagtaaattgttaaaactaattttttctaatatgtgtttggtagttttcattgttataagttgtccacctctatttaataaaatagatacttgtttttcttctggtaaagcatttaaggtattggcaaagtcactatatccatcaacttcagaattatttacctttactatagcatcacccaatctaaatggagatgcttctccaggatttctaactatgatattttttaattctgcgtcaatttgaagtacgtttccaattggtattaaatattcaggttcatttttttgtaaattttgtgcataaattaaattatttgagaaaaaatataataaaaataaaaatgttaaaacaattgtaaattttgacttagctaagttggtttttttacttaaagtattatttttaaaatgaaaatttttaagttgcataaaacacctctttcttattaaattattttaataatagaattgaagttttcttgctgcttctatattatgttgtgcaagaattatgttttgatgcttggaaaactgactcaataacaccttagttttcataaaaataaataaaataaatagtgtatatgataaaataaatacatattcatataaataaaaataaacaataactgtctagcataagaaaggagcaaaaaatgaaaaaatatagattgttagttacttgtataattgccatgggaatcataattataggaacatcaaatccagttagcaatttttacaagactacaaatttgattagttcaggaaatatcacaaatgaaaaagcagataaagatgaaaattcaaacaaaaataataaagataaaaatgaagacaaatctaattctaaaagtaataaagataagtcatcagaggacaaatcgtcagataaaaaaaataaaattcaaaaaaataaaaaacttttaatttgtatagacccagggcatcaaggaaaaggagatagcaatttagaaccagtagctccaggttcttcctctaaaaaagcgagagtatcttcaggaacagagggtattgctacaaaaaaaccagaatatgttctaaacttagaagcatctcttgttttaaagagtatattagaatctaaaggttataatgtaataatgactagagagacacatgatgtaaatataagtaattcagagagagcaatacttgctaatgataaaaaagcagatatggttgtaagaatacatgcagatagtttaaataattcttcaaaaactggagcatctatattgattcctgaaaaagatggaaaatatacagctcctatatatgaagagagtaataaatgtgctgaatttatcaaacagaatatggaacaatcaggtatacaaatcaatggaatcgttcaaagaggtgatttgactggatttaactggtcaaaagtaccagccgtattagtagaaatgggatttatgagtaactataatgaagaccaaatgatgtcaaatccagactaccaaagaaaaatgatgcagtgtatagctgatggattggatgcgtattttaaataagatatgaatagagaaaaagttaggttggtattattttcctaatttttatctctattttttattgtacataatgcaaagaagaagtttattttaggttaaattgtcgtaaatataactaaaaatattgggaatacttgatttaagtttaaaaagaatatattatagtatagaatgtgtaaaatttttttgagaggtgttgaaatgctagtagtagaaaatgtgagtcatggatttggtgcgagaacaatattagaaaatgtatcctttagacttagaaaaggtgaacatattgcactagttggtgctaatggagaaggaaaatcgagttttttaaatataataacaaagaagcttatgccagatgctggaaatataaaatggtcttcaagagctacagtaggttacttagaccaacatacggtattaagcaaggaaaaaactataagagaagtgcttagagaggcttttaagcatatgtttgacttagagcaagaaatgattgctatgtatgacaaaatgggagaagctagtgatgatgaaatgagtaagcttcttgaagaaacagcagagatacaaactatacttgaaaatagtggtttttatatgatagatgcaaagatacaagaagttgcaaatggtcttggtcttggagaaattggtcttgataaagatgtaactgacttaagtggagggcaaagaacaaaagtacttcttactaaacttctacttgaaaatccaactattcttatattggatgagcctacaaactatttagacgaagagcatataacatggcttactaagtaccttcaagagtatgagaatagttttgtcttagtttctcatgatattgaatttataaataatacatgtaatgtaatatatcatatggaaaatggagagttaaatagatataaaggaaattatgatgaatttgtaagacttaatgatataaagaaacgtcaagaagaacaagcttatgataaacaagttgaagaaagaaaaagactagaggattttgtagctagaaataaagctagagtagcaactagaggaatggctaacagtagacaaaagcaacttgataagatggaaatattagaaagaccaaaagaaaaaataaaacctacttttgcttttaaagatgctagagcagctagtaaaataatttttgaaacagagaatttagttttagggtatgatgaagcattgacaaaaccacttaatttccatttagaaagaggaaaaaagattgccttaaaaggaatgaatggtattgggaaatctactctattaaaaactttacttggaataataaaaccatttgaaggaaatgttaaattaggtgactatttggaagttggatattttgaacaagagagttcaagggaaaatagtaatacacctatggatgaagtttggagtgaatttccagggcttacaaactttgaagttagacaggctcttgcaaaatgtggacttacaaatgaacatataacgagtcaaatgagagtattaagtggtggagaagctgctaaggttagactttgcaaagtaatgttaaaaaatataaatttcttagtattagatgagcctacaaatcatttagatgttgaggcaaaagatgaattgaagaaggctatcaaagagtttaagggaacagttcttttagtatgccatgagccagaattttattcagaaattgttgatgatgtatggaatatagaagattttaccactaaaatcgtgtagtgatttaacttattgctggggggatttcatgaaaaagtttctaaatgtacttttttcagtttgtattagtattgttataatagtaggtgttattaattttactgttggatttaaacaactttattattttgacattgattacttaaatatatcagagttatctggtttatctgaagatgatataaaattgaactacgattatctaattgattataacttaaataagaatgtgtctgagttcaagttaccaacattaaaatcttctccacaagggaagatacattttgaagaagtcaggaatatatttcaaaatataaataaattagctaaattattattggtagtttttttagtaggaattatattgagtgtaaaaaataaaaatataaaaatcttgaaaactacatcaataacacttataattatgccattattattaacagttccaattttattaaattttgaaaaatcatttattatttttcataaattattatttagaaatgattattggatatttaatccaaatttagacccagttataaatatattgccagaggaatttttttttcactcaggaatgatgattttaatattaattttgttagcaagtatcttactatttgtaatgtatagattatataaatctttcaaaataaaataagatagcaaaaacgaattatattaaaggttatacaataaaaatagctatgtaataatatttaaactaagagtagtcgataaatatttatgcatagctatttctaatagaaattactttttactagtgattttaactaaatcttgaaatttgcccataatgtaattgtaattatcttttttgtgaggtaacatgcaactactgcaatctttgatacctttatctgtatacttaaagtttccaccacagttttctcctaaagcatacaaaggacaatagcaaaatagacagttaaactcttctggtttattagttttatgacaagggaaaaattcgcaatctttgtgattaaaaaacttataattttcgcccatattttcctcctaattaaataaaatttaaattttttatactatataagattttggtgataatataattatactaaataattttatgaatagtcgataatatagtattattaatcatagtattaatggtataattagtcaacagaaaaataatgtaaaaattatgtaagtgtattttgtaattagaatatgttttataacaaaaaatgaggtgattaagtgaaagaaattcaagaaaaagcacttcttgtaggtctgaatttgactacaatagtgaaaaaaaatgatgatatagacactagtgaatctatggaagaattaaaagagctaacaaaagctgctggggcagaagttgtaggtagcttaattcaaaataaacattctgtagatgcagcttattatataggaaaaggtaaagtagaagaaataagagcctatagtgactctttagatgctactttagtaatttttaatgatgaattatctggtgctcaaatcagaaatatagagaatgttgttggaagaaaagtaatagatagaactactttaattttagatatatttgctcaaagagcacttagtaaagaaggtaaattacaagttgaattagcacaattaaaatatagattgccacgactttatggaatgggtggtgagatgagtagaacaggtgcagggattggtactagaggtcctggagaacaaaaactagaaatagataagagacatatacttaataaagcagcagacataaggcgtgaacttaaagaagtaaaaaagaatagggagacacagagagttaagcgtttaaagtcaaatataccgattgtagcacttgttgggtatacaaatgcaggaaaatctactcttttgaacgaattaataaagacacacaaggattatgaacaagaaaaagaagtttttgtaaaagatatgctttttgcaactttggatgtaactctaagaaaggctcttttgccgaataaaaaagaatttttagtagtagatactgttggatttgtaagtaaacttccccatgatttagtagaggcgtttaaagcaacattggaagaagtacagtatgcagatttaattttacatgtaattgatgcgacaaatactagttatgaattgcaaaaaagtacgactgaaggtgtattaaaagaacttggtgtaaatgataaaaaacatatacttgtatataataaagtggataagctagaattggatatatatcctaaaagtcaagaagatattgtgtatatttctgcaaaacaaggcataaatatggataagctattaaatatgatagaaattgctttaatggaaaatacttattcagtaagcttgatgttaccttatgagagaggtgatatatttagtagaataaaagataaatataatgtggagaattttgagtatggggaaaatggcataacgctagatgtaaacttcgatgaagaagattttaatatctatagagagtacatactagaaaaataggttgaatatggatataaattgggaaaatatagataatcttgaagattattttataacctatcttctttataaagaatctaaaacagtatctcaaattagtaaaattagaaatatttcaagtactgaagcaggtgagcaacttatacaagcaaaattaaaaataaaggaaatgcaaaaagatgattttgaggcatctaaggatattttagataaatttttagaactagataaaattaagagacttgattttatggatagcttagatgacgaaaaaatggtatactttaagagaaaggttttcaaaagaatccttgtggaaaaaaatgctgaagatttaattgttttaatttgggcgacaggtgagctaaaagatgatagattcttaaagttgcttcatcagctcacaaaccacagacactcagatattagaagaataacttattcagcaatcagaaagattgaatcaccaagtagtagagaagtactgcaaaaaggtctctacgataaaaatgcacaaactagacagtattgtgcaaaggctctttcaaaactaggggatgaaaacagtttaaagattttacagcagttgaaagacaagaataagaattttgaaaaagaatatgtgcttagagcttatgacgaagccattaagtcattggaaaatgcaaaaaatttgaaaaagtaattttttattaaagcaatttgtttacttaatgatgtatttctagagtttaacaaggtaataaataaattaatgggaggggtttcaaatgatagtaagacgttgtgcaggtggagtagtgttttatgctaataaagtacttattgtaaaaaatgataggggagaatggacacttccaaaaggaaagatacttggaggaggacttccatatgagagtgctgttcaaagagttaaagtagaaactggcatagatgctaaaatgatagatgtggctggcgatactatgtatgaatttttctcaagaagtagacaacaagaagtttgtaatgcaataatgtggtatgttatggaagcttgtaacactaattgtgtacttgctcctgaatttcaagaaggtggattttataaagtaaaggatgctttagatatgttatcacatcataaagagcaagctttagtagaagtatcttataaaaagtttaaggaattaaagaaattagtttcagagggcgatgatgttccagcaaattaattgtgaatttagaggattctgaggaagggatagccccttccttttttaattgaagcagttttaagcgtaaattatatagtctctttaaattatgatttatcaatttagagctttagtagtttatatttaaaatcagtaagatatatttaaaataaaaattaaaaagtatacaattttattatataattgtcttatgatattgattaaagaagtattaaaagtccatttatttttaaatagaataattttatagatatataatttgatgtgtatattagaaaatgattaaaataggaggaaatacaatgagcaattacaggacattacatgaatttggaacagatgaaataactattgaaaagtctgtttttattggatatgctaagcctataaagagtgaagaagaagcattagagtttataaatgaaataaagaaaaagcataaagatgcaactcacaatgtgtgggcttatactgtaggtaaaaatatgaatatacaaagatatagtgatgatggagaaccacaaggaacagctggaatacctacattagaggttataaaaaaagaagatttgagagatgtagtggttgttgttactaggtattttggaggaacaaaattaggtgcaggcggtctagttagagcttatacaaaaggtgctaaattgggacttgaagcaggtaagataatttataaggtaatgtatcaagaagttaaggttaagatagactatactcaacttggaaaagtgcaaaatgagttaatgaatttggggtattttataaaagatactgtatatgaggataatgttgagatagtagtgtattcaagattagaagatgtagagaaattatcagaaaaaatgattgatataacaaatggaacaggaaaaataattttaggagaggaattttatttgtctgaacaaaatggagaaattttaatataatctaaaaggttattagaatagttaatacctcaaatagccaattagtatttttaagtgaaaagccattaaattgatttaatctaaatcaatttaatggctttttatcggattttgcacagaatcctttttttacttcaaataaaccgactaaaagtaaaaatatcccaaatattttttttaatatatctgaagacagataattagctaatagtgaaccaaatacagctcctaaaaccccaaacacagctataggtataaccaatttaaaaattacatttttattttttatatgtatagcaagtgctataagtgtcatagggatagatgaaagtaaatttacgctttgtgctattttagtgtctatgccagcaagtaaaacgagtgcaggtataaggattgttcctccacccattcccattcctccaataattcctgcaaaaaatccaattagagcaaataacattaaaacaccatccttaatgctgcaattatcataattattccaaaagaaattctaagaaactttccagtaaccttatttagtaatttagctcctataataccaccaagaatacttccaactgcaactttaattgttaagttaacatcataagtacctttagatacatataaaacagaacttgctgtcgttaagaatattattatagaaagagcagttgcatgagatttatgttcttctaccttaacgatgtcatttaatattggaactaaaagagtacctcctccagaaccaaaaactccatttataaatcctgtaaaaactccaattatcgtattttttaagttaaaatcaaagtattttttctttaaatcatcagtttttttcataaaaatcaccttctgaaatagttttaccaaaataggcaaattatatttatataaaataagattaaatataatctttcatgtttgtttaattttgcataaaaaaaaacatattaaaacaacatattaatatatggtataatatattaaaacaaagtagcaaatttgagaggagataacaatgtcaaatataaaaatacaaatagacaaaactgtagaatggcttataaataaggttaatgaggcaaatgcaaaaggattaattgttggtgtatctggaggaattgattcggcagtagttgctaatttaattaaaaaggcatttccagaaaactctatgggagttataatgagcataaaaagtaatcctcaagatagagaagatgcacttaaggttatagagggatgtgatatagaataccttgatttagaccttatagaaccacaaagtgctatattagacatggtagtaggaaatttaaaagataaacatttatatagagcagaatatttaaagatgacagatgcgaacttaagagcaagagtaagaatgagtacaatttatacaattgctaacaatctaggatatttagttgttggtacagacaatgctgcagaaatacacacaggatattttactaaatttggtgatggtggagttgatattttacctattgcaaatttaactaaaggagaagtatatgaatgggcaaaagagcttggtgttcatgaagatttaataaacaaagctccttcagcaggtctttgggaaggtcaaacagatgaagatgaaatgggaactacttacaatatgatagatgctgtgttagaaggtagattggatgaagttcctaaaagagaccaagagataatagaaagacttcatagattaagtgaacacaagagaaaaacgcctgcacaacctcctaagttctaatttactatttataagatttgtgataaaatttacaagtgatgaaaattagaataattaattgtacgtattaaggagtggaaatatgggacgtataggtaatataattaatagaaaaggtaaacaagatgctcaaagagcaaagatatttactaaacatgctagagcaatagcagttgcagctaaagaaggtggagcagacccagagtacaatgcagcgttaaaaacagctatagaaaaagctaaggcagataatatgccaaatgataatatagatagagctatcgctaaaggtgctggagcaggcgctggagaagactatgaaactatagtttatgaaggatatggacctggtggagttgctgttatagtagaaactttaactgacaacaaaaacagaactgctggtaacgtaagatactattttgacaaaaacggaggaaacttaggaactagtggatgtgtgtcttttatgtttgataaaaaaggacaaatattagttggtttaggagatggagtttcagaagaagaattgatggatgttgcattagaagcaggagctgaagatttcataacagaagaagatggttatgaaataataactacaccagaagatttttctagtgttcgtgatgagttaaaagctaaaggatatgagtttatatctgctgatgtgaagatgatacctcaaactacgactgtattgactgaagaatctcatttaaaaatgatgaataaattagttgatatgcttgaagaagatgatgatgttcaagatatatatcataactgggaagtagaataaatagtataagcatattgaaatttataagcattgaatcaattttaacatgtgataaattttatagaataagaaattactaaaatagacatacgcacctctaacctatatttgcataataatatgtaagtataggtaaggggtgtttttatatttataggttaagaaatttaaagtaaattttgagctggacttgattgtctataaataattgatgggtatataacttgttgctgaataccatttatacgcccagttactgtatcaataatcatcctaagactacgttctgctgtctcttccatttttaaatctataactgtcaaaggaggaatacttcttgccattagtcgtgaaggtccattacttgctgcaaatatttgaatatcctctccaattacaattccagattcatgaaatgcattcatcataccaagagctacaacatcatgattacaaaaaattactttttttagtgaattttttgcaagcattttttgagcaatatcatatccactatctattttattagaacaataatatatagaatctgatagatgtattccatgttctttacatgtttttaaaaaagatttaccccttaaagtcatacatgtaaaggaagttgggttgaatacaacagcaatatcatttttaccattttgaatagcatgtaaagctgctatacgaccagtttcctcattatcaatagatacacttgaaaaaccaggtatttcacgatttacaacaactacaggaattttaggtttattttttactagatattctatatcatcagcattgatacctgttaaaacaattccatcataataattatttgcaaaaaagtattcatcatcacatagatgaccaactttgtaaggtcgtatgatgatatttatgtttaaatgttctaaagaaattatgtggtttattgcttgaagtatattggttgatgccaactcaaatccctcatcctgccaataaaaagctattttaatattattatgtttaataggagtagagcgtttatatccaagcttatcagctgaatttaatataagctcttgtgtatgtagcggaatcctgcgttcatttcctttaccacttaagacgtacgagacagttgctgaagaaagaccacagtcttttgcaatatctttgattgttgccatgataaaatcctccttaaatagttgcttaaatttgcttataccaataatcttaacatatattcaactaaagaacaatattctacaaggtgcatattttacaggattagaataaataaatttaaaaaaacttcttacttatgttgacataatttagtttataggattataatatgcttaaataagcttattattaactcaaattaagcaaagttaagcaggaacatgcaatgctagcttgcaatgtgactgtaaagggggaaaaggtatgagtaaggtaaatatatttgaagttggtcctagagatggatttcaaaacctgaaagagtttttagaaactgataaaaagcttaagattattgatggtcttattgcttcagggattaaacaacttgaaattagttcatttgtaagcccaaaagcaatacctcagatgaaagatgcaaaagaagtagcaacttattgtgtagaaaaatatcctgatgtgaaactttatgcattagttccaaatttatatggtgctaaagttgcatgggagtgtggtataagagatatatcctatgttatatctttgagtgaaactcataataaaaaaaatataaatcgtacccatgaagagtctattgatgagcttaaaaaaataatgaatacttatccagacatgaatatatgtattggaatggctactgtatttgggtgtccttttgaaggtttaccaaaaattgaagatgccataagatttgctaaacgcctttgggaaaacggtatcagggagataaatctagcagatacaatagggattgctgaccctaagcaagtaagagaaactattagtgcattagttgaagctttaccagagtgcagatggcaggtacatattcatgatactagaaatatgggaatggttaatactcttgtggctattgaatctggaattactactgttcagtctacacttggaggattaggaggatgcccatttgctcctggagcatctggcaatactgcaactgaagatttagtatatatgcttgaacgtatggggtatgatacaggagttgattttgttaaacttcttgaattatcaaagtatcagaagagttttgtaaatggagtatatagtggtcatcatgtaaatataaagtctgatagttgtaattgttagttctattgattaatcgattaaaaaaatatgttgattaaaaaaatatgctgattggtaaaatagatttattgataaaaaagataaattataaaatacattatctaataaaacaaataaaaaaattgagggggattagtatggatattatagctttacttttatttttaggagttattattattgcatttgtacgtaagaataatgcaggtattttggctctagctattggtgtcatagctgttagaatttttggaatggatgataaagaactttatggagctataagcaactcaatgtttactacacttgttggtataacactactctttgcaatagtgaactcaacaggagcattaaagcttgttgcagaaaaaattgtagctgcttctggtaaacgtgtttggcttatacctatagcagtttttatagcaggatttgttgttgctggtgttggacctggggcaattccagcacttgcaattatcccagcaatggctgttcctgtagccataacggttggttataatcctgtaatgcttgcacttataggtgaatgtggattaatggcaggtcgtatgactcctattactccagaaggtcaaattataacaaccgttgcagaaggggttggaattgaaaatgttatgcctactatcttagcctgtcaaactctttctacaattgtattttcaatagtattgtttataattttcaaaggatataaacttaaaaaacctataaatgttatagatagtaagcaaatagaaaaatttaatataaagcagataatttctctaataagcatagtagttatgattgcttttatcataatttttgatatgaatgttgggcttgcagcttttgcagtttcagctgtacttatttttttcaatattgctgatgaaggagaatgtatcaaatcaattccatggagcacgatagtaatggttcttggagtaggtgcaatgatgacaatcgtagatgcagcaggaggtattgacttgatgagtaatgcattatcatcactgatgaatagtaaaacagctactccaattatgagtatttcagcaggacttatgtctatggttagttctgctttagcagtagtttatccaactatgatgcctatgtgtgttgatatagctaaggcagttggaggagtagacccactagcacttattgctgcagtcggtgttggaggttctcttgctggtgtaagcccactttctactggtggggcattgattttagcagctatgggttcaagtaagaaagactttaataaggaagaacaaaataaggtttttgtacagcttttcattatgagtgcagttggcttattggttattgcagtagtatcaatattatcatttaatgcaataacacatttaatgaactaattataataactgaaaataattcattaaatttaatttttaatattaatcaatataatataatttggaggggaagttatgaaaaaaggagcattaagcaatataaaggtacttgaccttacaagagttcttgcaggtccatattgtacaatgatgttggcggattttggagctgatgttataaaaatagagatgccaagaaaaggtgatgatacaagaggttttggaccttttgtaaatggagagagtttatactatgcaaatataaatagaaataaaaaaggtatcactctaaaccttaaatcagaagaaggaaaaaatatatttttagaaatggtaaaacatgctgatgttgtagtagaaaattacagaccaggtgtaatggaaaagttaggtctgggttatgatgagttggctaaagttaacaatcaaataatttatggagctgtatcaggatttggatgttatggaccatattcagaacgtccaggttatgatattattgcacaggcaatgggtggtcttatgagtataacagggcaagaaggaggagaaccaacgagagttggtaatgctatgggtgatgtactaggtggaatgaatttaactattggtatactcacagcactcaacgctagaaaaataataggaaaaggacaaagagtagatgtttccctcgttgattctgttgtatcgtctctcgaaactggtatacagagatactttgattcaggacaacctgaacttatgggtaatagatatgcttcagcctatccttatgactcttttaaggcaagtgatggaagttttgtaataggctgtggtaatgacaaactttttgaaaagttatgtaaaaaagttctttttagagaagaccttttaatagatgagagatttaaaacaaatcttaagcgttgtgaacattacaaggctcttaaaccagaaatagaaaaatggtctgttaagcatacaataaaagaagcagttgacttaatatcagaggctggagttcctgctgctcctatctataatcttgattgtgttacaacagatgaacatatagcaaaagcaagagaaatgattgtagatattagtcatcctattataggaaatatgaaagtcaatggaaatccagttaagttgatgacaacaaaagctaaaattgatatgccagcaccatctctaggggaaagtaacgaggagatttataatggttggcttggttttgatagtgataaaataaaagatttaaaagaaaatggagttatttgattaaaaaatagctaaacacacttgtgactttagtcatgggaggttcagttagaataatatcaaaaaatattaaatcaatactgtaaatcaaatatagaattgtcagaagcatttaagatgggaaaagctacttagacattgagtctttgtggcttttcctattttcattaagaactttatattatcagaatagatatgtactaaactaaagtattaacaatttaaattaatagaaaataaactacctaattatgttgaataaagactactttagtgaaaataaacttatagagatgctatttaaattattttaatggaaatatcaaaaatgagactgcattctcaaaaatgagactgcgttttttaagtattttctcgaaaatgagacaaaaatattgttttatgagttttattgaagaaaaattcttctgtgaattacaatttaatcaattttaaagttgaaaattattaaaaatttagtgaaatttatgtatatttcgtttattttattaaaaataacaattttttactaaaaataaagaacttcaatggtgattggcatagtacttgctattttatattaacaagaaatgtagaaaaaataacaatgtataatggggggaatatgatggaatctgtaatggaaaatttgaacaatcttaaggtggaggttaaggacaaagtctgtgttattactataaatagacctaaagctttaaatgctcttaatagtgacactcttagggaactatcacaagttattgatgtagtatcagaaaatgaggcaatattaggagttattattactggagaaggtaaagtttttgtagccggtgctgatatacgccagatgcaaaactataaaagtgaggaaggcagaaaatatgcaggttatgctcagggaatttttgataaaattgaagctcttgagaaaacagtaatagcagcagttaatggatatgcattaggtggtggatgtgaacttgctatgagttgtgatattagaattgcatcagaaaaggctatatttggacaacctgaagttaatttaggagttattccatgttttggtggaactcaaagattatcaagacttgttggaactggaatagctaaagagttaatttttacggggagacaagtaaatgcagaagaagctaaatctattgggcttattaataaagtggttccaagtgatttacttttagaagagtctatgaagatgatgaaccaaatagttgaaaaagcgccaatagcaataagatatgcaaaagttgttattaacaaagggatagatatggatttaaagaatgctcttgaactagagaaagatattgcaggtttaacttttgctacaagagataagcaagaaggaatgaatgcatttatagaaaagagaaagccagtttttgaaaataagtagctattataactaaattggaacaatgtagaatatattcaaaatctaaatttcgtgaaaaaatacatatagtttaattttaaaaggagttaatttatgaatacgggagtaattataagtttagtagggattatcatagctctatctcttctagttgtaatggttatgaagggaataaatatttttattatagcaattgtatgttcatcattagttgctataacaggaagcctaaatgtgtatgatgcacttaaagtggattatatgacaggatttgttggatttcttcaggcaaatttctttattttcctaacagggacattaatgggaaaaataatggagattactggtggagcaaaatctattgctaagatgattgtaagatggattggtaaggataaagcactactttctattccaatagcttgtggaatattagcctatggtggagtaagtgttttcgttgtaagttttgcagtgtttccgatagctttagaaatttttaaagaagctgatttgccacgaagatttataccagcagctttgacttttggatgctcaacttttgctatggttgcaccaggggcaccacaaattcagaatattgttccagcatcaacattagggacagatattatggccggagcagtaaatggttttatatcatgtgcagtaatgtttatagttggaagtaccattttgtacaaaatggtttcaaaagaaaaagccaatggtggtcattttatagcacatgaatcagatatatttgatgaagcagaagcaactaattctaagagagaaaatggtcctaatggtgtaattgccttaattccattgatagtgtcaattttaataattaatgtaaaagttaatggaaaagcgatagtaccaattgaggtgggagtatttattggagctttattagtatatttattgttaaataaatatcaagataatactaaaatagttggacatgttggtgatgcatgtaaaactacagtagtagcaatatgtaatacttgtgctgtagttgcatttggttcagtagtaaaatcagcagttggttttgacttcatagttaatgccatgactaatattcctggtcctcctattgcaggggctgcagttggaactacagttattgcaggtatttgtgggtcagcttcaggtggactaggaattgcagctccacttcttggaccagtatttttagccaagggtgtttccgctgcagcattaactaggactatggcaatttcatcagcagcattagattcacttccacacaatggatatattgttactgtaacaaatggtctgtgtaaagaaacacataaggatgcctatatgccaatattctgggtaactgttttaactccgtttattggaaccatagtagcagtcctactgtttacaatgttcccgggattgccataagagaaaagataaaaggtataaattatattttgatattataaaatcaattttcaaaatatatacaataaatttcatgttttaatactataaatatgtatttaaaataacaaattgaccatataaggaggaattgaaagtgttaaataaaccattagagggagttaaggttattgacctaacgtattttgtagcaggtccagggacttctaaaatattagctgattggggtgctgacgttattaaggtagagccaagctttggagacccaggaagaaagacaggggcaacaatgacaatgccaatagatgattataataatcctttttacagcacatataattcaaataaaagaggtttgtctataaatcttaagagtgaaactggaattgaaattatggataagcttttaagtgaagcaaacgtatttgtttcaagttatagaacaggagcattaaaaagactaggtcttgattatgaatcattaagtaaaaagcatccacaccttatctggggtcagataaatggttttggcgattttggacctgctaaggataatgcaggatttgatacagttgccttttgggcaagaagtggggctatgcttgatatagcagaaaaagatacaagtccaataaatccacctatagcctttggagatgcaacaacttcttgtagtttatctggaggaatatgtgcagctttgtaccagcaagctaagactggaaaaggacaaaaagtaatggcatctttatttgggcaagcaatatggaatgcatcatctttattagcatctacacagtttagtgatgagtatccaaaaactagaaaaaatgctatttcaccagtaataaattcttatcgttgtaaggatggaaagtggatattcttaagtattttagagcatgaaagatattttgaggcactttgtagattatttggaagagaagacttaataaaagaagagaaatttgcatcttcagtagaaagtaagaaaaatgctacagaacttattaatattttggatggtgaatttgcaaagtttactcaaaatgagatggttgaaaaacttactgctgctgatatagctcatgaaaaaattcaacatgttaatgatgtagtgactgatgaacaggctattgctaataactatatatatgagcatacaagtaaaaatggaaataagacaatgcttgcatccactccagttaaatttggaaatattgaagttaacatgacttgtgatgctccacttataggagaacattcagatgagatattgagagaacttggatacagtgattctgatatagaagctctaattgaatctggaattgtaacaatgaataaagaagcatgtgaaatatgttaataaacatgtgaagtatgttaataaataggagggaattttatggattttagattaacagaagcacaattaatgcttcaaagagtagcaaaagaatttgcagagaatgaaatagcaccaatagctgctgaaacagataaaacaggtatttttccaagggagctttttagcaaaatggctaaaataggatttaatggcattggaacacctgtagagtatagtggttctggagggacagatatagaaaaggtaattgttgttactgagattgccaaaaaatgtgcagcatctgcagcaatattatcaatacacacaatatatgctcaagctattttgaaatttggtactgaggaacaaaagaaaaaataccttccaatgatggctgaaggtgggtgtgtaggtgctttcgccttaactgaacctaatgctggttcagatgctgcaagagctgcaacaactgcaattattgatgaagaaacggatgaatatgttttaaatggaactaagtgttttatttctggtggaggtcaagcagaatcattaataatatttgcactgacagacccatcaaagggaataaagggaatgtctgctatcattgtcgacaaaggtactccaggtttttcaataggaaaaattgaagaaaaaatgggtattcatggttcagaaactgcagagttaatatttgataactgtagagttccaaagtctaacttattaggaaaagaaggcaaaggatttaatatagctatgacttgtttagatggagcaagaattggaattggagctcaagctgtaggaattgctgaaggggctttagaagaaagtatcaaatattctaaagaaagagtccagtttggcaagccaatttcagcgttgcaaggtattcaatggtatatagcagatatggcgacaatggtggaatcagcaaaattattagtatattatgctgcagatttgaaagctagaggagaaaaacacactaaagaagctgctatggcaaaatacaatgcgtcaagtactgcaagagaggttacaaatctagcccttcaaatccatggtggatatggatatatgaaggattatccattagagagaatgtacagagatgccaaaataacagaaatttacgaaggtacttcagaaatacacaaagttgttatttcaagagcagtactaggataggaggaaaagaatgaatatagttgtttgcttaaagcaagtttcagatactaatgaagttaaaataaataaagagacaggtactctaataagagatggtgtaccaagtataatcaatccagatgatagaaatgctttagaagaagctctaaaaatgaaagatgaactaggagcagtgattaaggttataagcatgggacctcctcaagctaaaagtgctttaaaagaagctttggcaatgggagctgatgaagcttatttaatctcagatagagcttttggtggttcagatacttgggctacatctacaattattgctgctgctatagaaaaggttggaaagtatgatgtaatattctgcggaagacaagctatagatggagatacagctcaggttggaccagaggttgcagaatttttagggataccacaagttacttatgcaaaagaagtaaaggttcaagatgacaaattactagtaactcgttatacagagacaggggattatttaatagaagcaaagatgccagttttattaactgctataaaagagttaaacaatccaagatatccaagtgtaaaaggaatcttagaagcttataataatggagatgcgaagattactgtattaacacttgcagatttagatgttgatacaactcaaattggattaaagggttcacctacaaatgtttataagtcttttgcaccagttaaagacaagcataatgaaataatagaaggtataaataaaaaagaaaaagctgagaaactaatagaaatactattcgatttgaaactagtataggagtgttaagatgatgagagcaaaagttaatcaaggtataaatttaaatgattataatggtgtttgggtaataggggagcaaagggaaggcaaaattaatcctgttacgatagaacttattggtgaaggaagaaagcttgctgaccaattaggaaaagagcttgaagttgtgatagctggatatgaagtagagaaagaagtgaaggaattacttcactatagtgttgataaagtatattacatcaatgaccctcttcttaaagatttcactactgatggatatgcaatttcaattgcaaatttaatcgaaagaaaaaagccagaggttgtattggttggtgctacttctataggaagagatatagcgcctagaattgcaggtaaggttggaacaggtctaactgctgactgtacaaaacttgaaatagattcaacagataataagttattacaaacaagaccagcatttggtggaaatttaatggccactattgtttgtccaaaaaatagaccacagatgtcaacagttcgtccaggagttatggcaaaagctgtaagaaacgaatcagagactggaattttagaagttgttactccagaacttactgaaaaaatgattagaactagattagtagaggtacttccacaagaaaagaaatctgtaaatctaactgatgctagaataatagtatcaggaggaagaggattaaaaagagcagaaggatttgagcttataaaagaattggctgataaattgggggcagagattggtgcttcaagagcagcagtagattcagggtggatagaacattctcatcaagtgggacaaacaggaactactgttagaccagaactatacattgcatgtggaatatctggagcaatacaacacttagcaggtatgagtgattctaaatatatagttgctataaataaagatgcaaaagcccctatttttagtatatgtgactatggaatagtaggagatttatatgaaattatacctgaaatgatagaatcattaaataggtaacttttagaaaacattgaatatgtagaatgataagtcttataatattgtattgtaagacttattatttttgctgaaggttatagtggggagatgaaacaatgaaagagcagtggtataaggatatatttgcaagaatattatctatgactgatgatggttttattgttgtaaatacaagtggagtaataatagatattaatgataaatattgtgactttttaggaaaagaaagaaaagatataataggacaaaatatacaaagtattataccaaatacaaaaatgctagatgttatgaaagataagtactgtgaagaaggagctatacatcattattcaggtggaaatacaaaagaaaaaagtgtaatagtaagtaggtcttatgtagaaaatgacaatggagaagtagttgcaggagtagctcaagttaaatttagattgcaatcatttgatgtagctaaaaaattaatgtcagaatatatggagctccaatattataaagagcagtttaaggataactgcggttttgacaagctcataggtgaaaatagagacttcatagaacttaagaaaacaggtgtgaaagcttctaaaacaaactttccagtacttttaacgggtgaaacaggcacaggtaaagaagtctttgctagagcaattcacaataatagcagtaggtcagataaacctatggttagtataaactgcgctgcaataccagaagaattattagagtcagagctatttggttatgacgaaggagcttttacaggagcaaaaaagggtggtaaaaaaggtaagtttttagttgcaaataatggtacaatctttttagacgagataggtgacatgcctttgaccatgcaagcaaaacttttaagggttcttcaggaaagtgagatagaaccagtgggaggtcttaaaactataaagatagatgtaagagtaatctctgccacaagaaagaatttaagtaaaatggttgaagagggattatttagagaagacctatactatagattaaatgtaataaacattcatatgatggaattgaaggacaggcaagatgatattttattgctagcaaattatatattaaacaaattaaatgttgaatacaaggaattgaaggttttaagtgataaggttaaaaattgttttattaactatacttggccgggaaatataagagaactacaaaatgtaataaaaagtgcctatgctgtaagtgatgatatggtcattatgatgtgtgaccttccatctaagatggataatatcagcagagtagctcaatgtaatgtggatagcaattgttcaattcatgaaatggttgagaattatgaaaaaagcttaattattgatgtgttaaggaagtataattggaaatgttctaaggcagcagaggttatgggaatacacaagagtcttttatataagaaaataaaaaagtatgaaattgaattaaataattaagataacttgaattaaggcaatgctaaaaaaagcgcccttattcaaagcgaactgtataaactgttttatgcagttaaaacgtgtaaaagtagatgtgaagtactaatgtcaatcattagtactttttattgtatttataattactatctatatttcagtatcttttgatatctaagattattatgtttaatttaggatataacaaaaccctcttagttattgacagttttttatattttaactgtctactaagaggggatagtttagtttaaatttagagtaaattttatctagcatttataaaaaatattttgaatagcttttttgttatttagtcataattttctacttctttatcaagttctttgccacaagaatcacacttatatatagcattgtatccataatcatattcatcaactattttcttttgtctaaatacaccaccacactcacataggaaaccaatttttataagtgtaacgataaattgtgattttataaattttatatcattacatttatcgttagtgtaaaatgtataaatataagagttatcgcactcatctcttaattcaaatctttcaatatatgtgttattttttaattcctcaaattcttctttagttaaatatgatttttgttgcaattcatgtaaacgcttaatttggtccattatttatatcctcccaataattttagtattttaagcttagataaggaatctaagttttattaaatttatcccaaggaattatttaaatcatatttagttttattaattacaacatatataaattacacgaaaataaaactaattgtaaaaataatatcctgtgaaaacctaaactactaaccccttactaacccgaaaactaaaaaaagaaaatatatccaaatataagtgatatataaataaagatgttttatataaatttaactttaaatattctgacaataatatatataaatatattatagttaaaatataccacatattttgggcattgtatactggaattagagtaattaatttattttttaacatacaaatgattttatgaaaaaaaacaagactcaaaaatttttatattctttgatagaataaaattgagagtaaatttattgaattttataaaatttataaggggtgagtctaagatatgcatgaagataaaaatgatatatttgaatcaatagatactgaggattttgataataaaacagaagaagaatgtttagagctagtaagaaaaaatggattgaatttaatatacataaaaaatcaaacagaagagatatgtctagaggctgttagacaaaattgtaatgcaataaaatgtgttcagaatcagacagaaaaaatatgtatagaagcagttaaacaagattggagaatgttagaatttgtggaagagtcaacagaagaaatttgcatgttggctattaaccaagatggaacagcattaaaatatatagaaaatcagacagaggagttatgcttaagagccgttgaaaaaaatggtgcggctttggagtatgtaaaagaacaaacagaagaaatatgtatagaagcagttagaaacagcgaatttggattggcaagagtgaaaaatcaaacagaaaaaatatgtatggaagcagttaagcattgtagctataatctaaaatgggtagaaaatcaaacagaagaaatatgtatggaagcagtgagacaaaatgggcttgatttgaaatttgtaaaaaatcaaacagaaacaatctgtttaagagcagtaagacaaaatggaatggcattagaatttgtaaaggaacagactgttggtatatgcttaaaggcagtaagacaatatggaatggcattaaaatttgtaaaagaacaaacagaagaaatttgtacagaagctataaaacaagataaaagagcacttagttttgtaaaaggagataaggaaaaatacaaggctctatatgataataatgaaccatttgcaaagagatatgttagaaatgtaatagaaaaagaaaacagagcattgattaaaaaaggagaagaaaatgcaaaaatcaaaattgcaggaaaactttatgatagaggcatgtcttttgaagatatatcagatatagttgagattgaaataagcaagttaaaagtgagtttaggtgttttttaaagtaataaatgtaggtgttttttatgggaaatagttaataaaaaaataatcgactagctctttgtaggacagcaaaattagtgatataatttgatgtataataaattatttttattagataagggggaattaaagttgaagattacagtattataccaaacaagaagtggaaacacagaaagggtcgctaagctgatagaagatggagctaaaaaggtggatggagtagatgtaaagcttatgagacttgataatattgatttagattatttaaatgaaagtaaagcagtaatatttggaacacctacttatttagcaaatacaacttgggaagtaaaaaaatggtttgatgaagattcaaaaaaagttaatttagctggaaaattaggagctgtttttgctacatgtgattatatatgtggaggtccagatgttgcgatacttactatagtaggacatttgatggttaaagggatgcttgtgtattctggaggtggttctttaggaaagccatttatacatttaggacatgtacattcaattgaaggtccagagttacaagatgagaaggctataatatttggtgaaagaattgctactaaggcaaaagaactatttgcttaatttctatatgcataataatgattagagtaaatttagggttttaatggagatttgaagtaaaagttataaaataaaaaattttccataaaattactcaagatgaattataatataattataaataaattatattattaaaatatttaaaatcaaacgtcaatagcgagggaagtttatggtatggcatatagaatatgagattttttctgcaattatagttatttttttaatggtatacttttttagaagtaaatttatacctactttacaaaacaaaatatattgtgcacttttaatattctcatttttatttatactttcaaatattttaggttcattttgtctaaataatatagacaaaattccaatttttattacttttttattgaatcagatatacttattgttattgccaataccagcagctcttgtatcattttatgttatggctattatttatcaagatataaggtatatgaaaaaaagattattatttttatctataccacttataatttgtataatcttatctattacaaatccttttacgcatattctatttggattgtcaaaagaaacaggttatatacggggttgtggatatgttgcaacttttgcatcttttttcttttatgcaatatattcagcatttttatcttttaaatatagaaaagcaatgcatgaatcaaaaatatgggctattagaggttttcttatagtttcaattgtggcaattatcttacaggcaatttttttacagtatcttcttacaggaactgcatgtgcatgtagtttacttttgacatatctttctatgcagaatcgaggtcttattattgatgaccttactggtgtactcaatagacaatcttttattcaagagctagatttgaatatcaatactgaacaatcaggatttattattacaattgcgcttgatgattttaagtttatgaatgaaacttttggaacaaaaaatggagatattgcactaaaagaagttggaaaatatttgattcagatacatgatgtaaaccatgtatatagaatagggggagatatattttctattgttgtcaatagtcaattaggtatagaaccagatgatattatcagaaagatagaagaaagatttaaaaagccttggctagtagaagagataagttttaatttagcaactagtattgctgttgtttattacccagaaaatgcagaaacgacagaagatgtaattgttgctatagatttctctatacatgaagcaaaacgttctgagtcaaggcgagttgtttatgcagatgcgtctataagtgaaaagataaagaagaaacatgttattaaaaattgtttaaaagaagcattaaaaaatgatgggtttgaagtgtactaccaacctatattttctaatagcaggggcaggtttacttcagcagaggcattacttaggctagaacacaaagagttaggttttatacctcctgatgaatttattccaattgcagaacaaacaggattgattaactcaattggattagtagtctttgagaaggtatgtagatttatagctagtgatgagtttgaaaatttaaaattggataatatagctgtgaatctttctgtagtacaatgtatgcaaaaaaacttagctgatgatttactttatcttatgaataaatataatgtatcaccaactaaatttaaacttgaaattactgagactgtggctatgggctcttttaatataattaaagaaacaatggaaagattaattgatttaggtgttaagtttgcacttgatgattttggaattgcttattctggagttactaatatgctttctttaccattttcagtaattaagttagataagagtttgatttggtctatgaatgaagatagtaggcataagcttacagttgagacgattatagctcttataaataaattgaatatgaaggctgtagcagaaggtgttgaaaccattaagtgtgctgaagatttaatagctatggagtgtgaatatttgcaagggtattatttttctaaaccagttccagaagatgtttttaaaaatttgttgaaagaaaatacttttacaagttaacaccctttatttttttaattacaactttgttcattgacactgccagcgatatattataaaattaacacaataataaatattaaatttattatacatattattaatattaattaatggagtaaagatttattatattttatttaattatcctaaagtgagaaaggaagatgtgacatgaataaaaagaaaatattagtgccaattgatgggacagaaagaagtatgcattctttggaatttataaaaggaatatttaaaaaagatgaagttgaagtagaaataatgaatgtaaaagaactagtatttattgatggcatatccctggctgaagagataaaaaattctgaaaatttaggaagaagaatcttggataaagcagcagagataatgggagagtatgatgttaaagtacattttacttttggatatccaggagatgagataattagaaaagcaaaagaagataatgtagattttatagttatgacaaaatctactaaaaaaggtcttacaagaatgataggttcagtaacagcaagtgtagttaaacaagcaaaatgtatagtgatgattgtaccggagtagaattagaaaggtatttgaaatatgaataaaaagatagtagcagtttgtgaaagtgaaagaagtttaaattctcttaagacagctgcaaatgatttaggatttgatttagtttatgaaattcaagaaaatgataatataaaaaatgaactttctatttatgatatagaagatgcatctatagtgttatttgttacaagtgattctatagaaagcatagagaagattgatagatttatagatagagaattttatgaagttgatccaaagtatataatagaggatgcaaaatctatagtaagtgaaattttaatagacttaaattaatcgtgggtgtcgcactaagaatagagcgacgcctttttacatattttacataagaaataaagggctgtctcaaactatagataagactctttttcattgttgaaatgatgaaaatatatttgatttcatacaaaaaagagtgcctcataactaaaaagttcactttgagacactccatttttatatgttagttgcatttaaggtaaaatagaagtttaatcatgttgaaataactgaattacatcttctaaatgattgtacattgatgtataacctaagtaagagtctttactatcaaatgccatcattatcttgttatggtggctaatcatatccttaagagaatttctatatttaaaaccgaagtattggttagaagaaactgttttaggtattaactcataatattttataaaaattggattatgagaagctaaaattatctctttgtgaaattgtaagtcagcatcataacattcttctatcaaaccatgagaaaccttatccaattcctctattgactttaggtaagtatattttattttttgaagttctttagatgtagcatttaaaattgctagtttagtagcttcactttcgataagttgtcttgctcttaaagattctacataaaattcttgtatgttatgatttttatagatttcaccatcatcaaataggtcaacttttttaaatccttcaactataggacttgagtaaggcacagctctaagtattccttccttacagagtatatttatggcatttcttacaggtattctacttatgttaaataggtcagcaatctttctctcacttggtaatttactattaattttaaaagttccatttagaatgtttaatttaatataatcaataattttttcagtggcatttaagcttttcataaaaactcctaaacatataatttttttatgattgtattatatcatagttaagagttaaatctacttttttataatatgtataagacaggatagaggccaaaatagctataatagccaagataaagtatccatattgtattgaagtatattccgatattttaccaactatcattggaaatacagacattcctatagcataaattgcttgaaaaaaacccattgcagtagatttctgatgttttggtacatttttcatagactcgctagtaaggtaagaaaggagtatacctgtagatatacctggtagcacttgtagtacaaatattatattaatattttttattgttggaactaaaaagcaataggctgaaactaaaataaaaactaaaggaatccaaaattttggcccatacttagtacaaaatttagtagaagcaaagccagaagaagcaacagcacacaccatgtaagatatagaagatagacctatgagggtagaactagaacctaagtttttaagaatttgagtagtaaatgacattgttgtagacatttgaataccctgttgaattaatgccataaaggaaaaaaatacaagtcttttatctttgcagatagataaatattttttaattgatattttttcaggtattttttttgaattatgattttttatatttaaggctagaatcgttccaataactgaagacaatacactcatgatacataaggctgtcattcctaatttttcataaaataaagtactcataacaaatccaatcaacattcctagattgtttaccaatattatcgtactcgtagctttttgttgatgttctgtagaaaaaaagttggtatagtgaaccatgtaagaaatccaagttgatgatgatattccagataaaatgttagctataagaaaaccattgcctccaggagaaaagactcttataagagatgctaaaccagcaaagaaaattccagacagtataaatattttatgtttatttatagaatcagcaaatactccaacaggaatccttaataaacattgtgagattccatatgcacctattattataccaatcatatttgtagatacattacatgcacttaaatatggattttggaaaggtatatatacatattgtgaaaaccagaaaaatgtaacaatagaaagtaaaagtaatttttgattagatatttttttcatattatcctccatatggtatttttataatgcaaataatataccatttagattttttaatcaagtactttctctattaaaaaaaatttaaatatataattattatttacaaaaaaattatactttatagttgaattaagaaaacgcttatgatactataaagttaacaaatttgaatatataacagtagacgtgttactggtaatgcaggcaagatcgaatcaatttttatagattatctatagagtactatgggtataatctatttatttggttcgatttttttgtttaattggccataaaacaaaaagcctatagttgaaaatggaggattttttatggattataaaaatatagctcaagaaattctactaaatgtaggaggaaaagagaatgtaaatgaagtgactcattgtatgacaagacttagatttaaagtcaaaagcgcttctaaagtgaataaggataaattatctaaaactgaaggagtaataactgttgttgagagtatgggtcaaatacaagttgtaattggaaataaagtaaaaacagtatatgatgaggttataaaaattgtacctcaatcaaatgacgtaggtaaaaagaatgaaagtcaagaaaagcaaagtataattaattctatattatcagcagtagctggtatatttacacctacaatacctgctatagcaggggttggtatgattaaaggtattttatcagttcttgctatgtattatatgaataaaaatggagtagatataaaagaaacgcaaagttatattatcttaaatgccatggccgattctatattctattttatgcctattatactaggatatactgcggctaaagtatttaatgcaaataaaataatatctatggtattaggagctacactttgttatccaacttttactgctttgatggcaggtgaagaatctgttagatttttaggattggcagtaacaaaagctacgtatacatcatctgttattccaataattattgctatatgggctctttcatacgttgaaaaagtattagaaaagtatatacctgaggtaattaaaataataatggttccaactttatcattggttgtaatgttacctgcaacattatttttatttggaccaatcggaatttatataggaaatgtcataaacttttcttataagtatatttatgaattaagcccagcgttgtgtggagcatttgtaggtgggttatggtgtgtgttggttatatttggtgctcatagagcattattaccaataggtataagtgatgttgctcaaacaggaagacagaatttattggcatttgcaggagctgcaaacttttcacaagcaggggctgctctaggagtattctttaaaactaaaaatcaaggactaaaaacaatttctatgtctgcaactataacagctttatttggtataactgaacctgcaatatacggtgccaatcttagattaaaaaaacctatggtatgtgccgtaatatgtggtgcatttggaggtgcgataatgggaatgggtggagcttatggtaatgcatttgcaaaccaaggtgttttaactatacctgtatatgctgaagcaggtgcattaggtttcttaagttatctaggtggttgtgctatagcattttttggttcagctatttcaacttatctagttggatttgaagatttggaagagtcttctaataaggaaaattcatttataaaagtagaaacgaaggatggtgttattgatataacttcacctgtagagggcgaatgtatagaattgtcagaagtaaaggatgatgtatttgcttcaaaagctatgggagaaggtatagctgtgttacctacaaaaggagtaataacagcccctactgattgtgaagtagcttctttatttccaacattacatgcaataggattaaaattagataatggagcagaaatgttaatacatgttggaatcaatacagtagagttaaatggtaaatactttacaaaacatgttaatcaaggagatttagtgaaaaaaggtgataaacttatatcgtttgatatagataaaataaaaaaggctggttatgatgtaactacgccagttatagtaaacaatacatttgattttgggcaagtagtttcttgtaaatctagttatgtttcaaccaatgataatataatttcattagtattagctggtaattaagttaatttgactagagataagtaaattgatttaaaaggaaataagtaaatcaacaattaaatacatctaaaagtaagtttattgcaatgaattgttaaagaaaataattaatatggagtaaagctattgcaatgaagtaacaaagaaaataattaatatagagtaagtttattgtaatgaattgttaaagaaaataattaatatagggtaaatctatctcaatgaaataacaaagaaaagagttaatatagagtgaacttattgcaatgaatcaacaaaaaaaataatcaatataaaaaggagaaatatttatgaatacaggatttccaaaagactttttatggggagcatcatcttctgcatttcaagtggaaggagcttgggataaagacaataaaggaaaaaccgtagccgactataattcttttaaaaagtctcatttacaggcagatactaaagttgcatcagacttttaccataattatgaagaagatattgaattaatgaaagaattagggatgaaaacatatcgtttttcaatttcatgggcaaggataataccagatggtgaaggagagataaaccagaaaggtttagacttttataataagataatagacaaactaatagagtgtgatattgagccattcgtaactttataccattttgaccttccatttaaattagtagagaaatataatggttgggaaagtagagaaactgtctatgcttttgaaagatttgctaaaatatgctttaagcattttggagatagggtaaagtattggcaacctcataatgaacagaatttaattgttagagtggaggagagaattaatatatatgatgaaacagattcatggaagatagataaaatgcgtgctcagatggattataatctttgcttagcacatgcattagcagtcaatgcatgtcatgagatgataaaagaaagtaaaattggagcagcagtatcatcatctgtaacatatcctcttacttctaagccagaagatgtatatgcagctagaatgaatgataattttaaagtgtactatatgcttgatatgcatcattatggagaatatccagggtattatatgaagtatcttgaaaaaagaaatacagttcctcacatggaagatggggataaagagatacttaaaaaagctaaaatggattttatagctgtaaattattataggacaaattgtgcagaagctttacctgaagattcacaacatccatttggattaagagaaggaactgttgattttagtatgtatggactatttaaaatgtcaatgaatcctaacttagaggcttctgagtatggagcagcaatagacccatcaggtcttagagttgccttaaatgaatattggcaaagatatcacttacctgttataataacagaaaatggtctaggagctaaagatatattagaagatggaaaaattcatgatgactatcgtatagactatttaagaagtcatataaatgcatgtaaactagctattgaagatggtgtagagatgattggatattgtccatggtcatttacagaccttttaagttcttctcaaggttttaataagcgttatggacttgtttatataaatagaactgaccatgaagttttagatttaaaaagaatcaagaaagatagtttttactggtataaagaagttatagagaacaatggaatagtaaaataaacataaatatatattgagggttttagtatgtacattacaaaggtattaaataattcgttgctacttgcaaaggatgataatgatgaagaaataatattgatggggaaaggcattggccataattataaggccgggtctgagttaaataaaaaagatatagaaaagatttttgttcttcatgatgaaaatataaaaaagagtattatacaattggcaacagaaatagatgcagaatattttggtatagctcaaatgataattgcatatggaatagaaaaatataacttaaaacttatgaaccatatatatttggccttaactgaccacattgcctttgcagtgagacgctttaaagaaggtataatgattgaaaatcactatttgttcgaaatcaaggaatttaatccaaaagagtatgatataggaaaatatgctattactgtttttaaggaggttcttggtttagacctaccagaagaagagattggtaatatagcaggccattttataaatgcacaacaagataatccttatagtgatagaaataagagaagtgctaaaattgtaaatgctattttgcaaatagttcattatcacttttctattgtatataataaagagtcattttattataggagatttgtaatgcatctaaaggccttttcacaaagatttctggctaatgaaccatcaagagaaaaaatagattttatatatgagcaagttcaaaaaaattgtaaggaagagtatgaatgtgtgaaaaaggtaggagcttatatgtataaggaatactccagagaattaccaagacaagaggagttatatttgatgattcatattcataagattttaggagaattatgcgaaaatagttagaatatcttaatatgctagtaatattataaaaaattaaaaattaactacactttaaatatgaacaattgcattacttaagggggttgtcttaaaattgatttttttaattaaatttgaagctcaactccttttttaaacctttatatcattacaactttaatgtttatacgcctgtactttagatgtatatctactttttacatttctcaacatgcaaacctaccattttttgcagtatgttaattgaaataaaccattgagttaaccctaaatttattctggacttataggaatagttccaaagatactttaaaatattttctggaataattgcttatttcacatatgttttattgtgatgttttgatttaataaattcttcaactctgtatatagtaaatgtattatcatgtttgttttattcaagcacacttataatacgcttgattttttcacaatgatgaaatatactaatgggtgttataggtataagaatcgaattacacttgaagaagtaagtgataaatgagatataaatcctcatatgataaactactatttcattgaggaacatattctaagtgatgtcaagatactacaatatgactaaattcctagtgataaaaaagtctacgaatgagtgtagaaaggggaactaagatgaataaagttttaattatagatgatgataaagatctttgtattttgttaaaaaagagtatttcaattgaacagattgaagcaaactattgccattctgggagagatggactggttgaactttcaaaacaagattatcagttagtagttctagacgtgatgatgccaggtatggatggttttgaaactatggaacaaatacgaaaatatagcagtattcccatcttaatgctgacatcaaaaagcgataattacagcaaagtgcatggattgcgagctggtgcagatgactatctaaccaaaccatttgaaattacagaatttactgctcgtgtactgtctttaatccgacgttacacccgttttaatccaaaaaatgaggaaccacagcaactttctttcaaaggtttgttgattgaccttgaccagcatacagtgactaccaatggcgaacctatgttgcttccacccaaggaatttggtgtgcttctttactgtgcaaggcatcagggtaagattttgacaaaacagcagatttatgaagctgtgtggggtgagccatatgtatatgatgacagcaatatcatggctattatcagtcgcctaagaaaaaaaattgaactagacccatcatctcccatctatttgcaaacaataaaaggaattgggtatcaattcaacacggaggtatgaaaatggatgaacaaacgataattcttttcttattcttgctgtcgattggtctactttttctttccatatttgctttttccaagcttgggcatattcacaaacgcctaaaagatatagaggagatactggctgatgtacaaattggaaacgaaaatcgcaaaatactaattaagccatgtgatgttatggctccattggtttatcagcttaatgagattgtctacgattatgaaaataagttactttctctgaaaaagtcggataaagctagcaaacaacttatgacaagtctatctcatgatgttcgtacaccattaacaactctgattggttatctggatgctgtacacagtggtatagttatcggacaagaacgggaggaataccttgaaatcgctaggcgtagagcctacgacctcaaggattacattgatgttctttttgactggtttcggttgaactctgatgaatttacgctgtcaatagaatctgtggaaattgcagagttgtcacgcaatattttgaaagactggattcctatattccatgaaaagaaactgaattttgaaattgatattccagaaaatcgactaatggtaaatctcgacccagatggatattcccgtgtggttaataatctggttcaaaatgttcttgctcacagtaaggctcggcaaatcaagattaccatgagtgaggattccagaatggtattactccgtgttgatgatgatggtgttgggattgccagagaaaatttaccacatatttttgagcgactgtataagtgtgataaaggacgttcagaaaaaggaagtggtcttggtctatctattgtcagtcaaatggtggagcgaatgggtggtcagatttccgtagaaagtgagattggaaagtataccgtatttacagtgagcttaccattaatataaaattgtttttcccccatgtgacatgtatacacagggggattttttgtaagttataaagttgcaaggttaatacaaggttgttgcaaggttaatgtaagattgaggtggtatgatagctttaataaacaaaggaggattttattatttatgaataatttaattattgaaacaaaaaatctcactaagcaatatggtgctcaaaagagcgtttctaatttgaatattcacgttcagaaaggtcgcatttacggattgctaggaagaaacggtgcgggtaagacgacaactatgaaaatgttattgggtctaacaaaaccaactactggagaaattaaaatatttggtcaggacattcacaataacgagaagaagcttcttcctcgaattggatgtttgattgaatcaccagggttttatcctaatctgacaggaacagaaaatctcaaaatctttgcaaggcttagaggaataccaaaaaaaaatgcagtagaatcagcactggatgtagtcggtttgccaaacaatgacaaaaagttattttctcaatactctcttggtatgaaacagaggttggcgattgctcttgccattatgcatgacccacaactgttgattttggacgagcctatcaatggacttgatcctattggtattgcagaagtaagaaagtttattcgtgatctctgcacagaacgaggtaaaactattttgatttccagtcacattctttctgaaattgccttgttggcagatgacattggtattattgaccatggtattttgttggaggaagaaagtcttgcccaattagaagaaaaaaacagtaaatacatacattttgctgtatctgatgcagcacatgcagcaaggcttctggaaacccaacttaacctgaaaaatttcaaagtagcagataattacaatattatgctatatgatacagatgtttctgttgcagaaataaatcgtgctttcattctaaacaacattgaggtatcagaatctcatttatgcgaagatactcttgaagattacttcaagaaagtaacagggggtgaaggaattgcttgatataatttcatgtgaattttcaaaactcaagcggttaaaatttatactgatttctattttaggtgcttgcttatttccaattcccgcaacaattttgattgcaaaggacaacttgccctttgagcaattgttcaaattagttgtcaattttggatattttttgctattaccaattgtattaagtattgttgctagccaactattttttatagaaagagataacgatgtattaaaaaatcttgcaacagtgccagtgccaaaaggaaaactggctctggcaaaattggctgtgttgctgtttatatcattgttctactccgttgcagggttaggagctactatcattggaggtttcattgttggaatagtagagggggttactgtaaaattaggaatgagcattgcttttggaattatgttttttgttactgtacttcctgttgtggtactcattgtatatttcaatcgcagctatattttttctattatactttcttttgtatatgctattttcaattttagtatatccttaaatattatcaattttgaaccaaataacccactattaagcgtattacctgctcctgttataatgcgttggtggatggcattttggggagatcccactggcgaatacacggcacttagacagccatatttgctctcaactcctgcttgtgtaggtattttatgtttgataaccattatagcagtcctgctgatttgtatgatatacaaaaagcaggagaattaggaggtatctatgcttgatataattactacagaatttcaaaaaataaaaagatataatattctatggattggtgttgttgctgttctgttttcagcactattggcagtttttcaggttgtaagttcacacggcagtgaccctctaacgtatgagagctttgcaaacggagttatctggaataatttcagtcttagttttccatttgggattacacttattggaggatatcttattaaccgtgaatatacagaccaaaccttaaaaaacatcctaactgttcctatttcattacgcaaattgctagtgggaaaattaattgcggttggaggaattgctgtattgttaagtcttttcagcttcttatgcacatttattttggggttgttattttgcaatatcaatatatctgttacactcattgtaaaatccttagttcagattttgtctgttaatctgtattgttatgttgctgttttgccgattattgcttattttggtcgtaaacaaaatgcatttctgacgggtgtagggattgcatttgtatacgggttttgtggtgtgtttgttgctggaagaaatctgacagacttttatccaatcacagcaggtcttggtctagttggatacaacaatggtgctggtactgtttatcagccacttatcggtgctatgactttgattgtaattctaatcttgacaactattctacttgtatttacacctaattatgataaagttatgaccatatctaagaaaaaagggataaagcataaaaagtattctcataaataacataaatattgtttctattatttaagttgctagacagtgaaaagaaaaaatctgtcgtacagtggctatatgctcatgtattcaagaagctacagttttgatttttcataactgtagcttctttttgtatttattaaatcacggctatcataatacttgcaataggtatagcgacaagagagagtactgtcatgtgtgttttatatattacattaagtatattctaaaatatatgttttaaataatatatttgaaaataggaatatttaaataaaaaaaataatattatatatagttgacaaaaattggcaaatgatataatatataaatatagaaatagtaatcattactattattaaaaagggaggaattaattatgaacttaaaaggaactaaaacagaaaagaatttaatggcaggatttgcaggagagtcagaagcaagaaataaatatacatactacgcttcaaaagcaagaaaagaaggttataatcaaatagctgctatatttgaagaaactgctaacaatgaaaaggaacatgctaaattatggtttaaacttttacatgatggtatgccttcaacagaggaaaatttaaaggatgcagcagcaggtgaaaactatgaatggactgatatgtatgcaaaatttgctaaagaagctagagaagaaggatttgacaagatagcttatttatttgaagctgttggaaaaatagagaaagagcatgaagaaagatacttaaagcttttagaaaacttaaatgaaggaaaaatatttaaaagagatgaagaagttgtttggcaatgtcaaaactgtggtcatgtgtatgtaggtactgaagcaccagaaaaatgcccagtatgtgaccatccaaaagcgtatttcaatataaaagctgaaaattattaaaaattatcattattaaaaaggaatgttaactatgaaattttctaaacaacgagaactgattttaaatgaaatattaaataatccggttcatcctactgcggattacctatatgaaaacttaaaaaaagataatccaaatttaagcttaggaactgtttatagaaatttagctcagctaacggaacatggctttataagaaaggttagtattccagggtatccagatagatttgatggtcgaatagataatcactatcatatcatatgtgaagtatgtggagaggtatacgatttagaatccgaagttcttaataatttacaagaattaatatctgaggagacagacataaaaataacatcttataacataagttttaaagggatttgtaataattgtaaaaggtgtagccaagtaggttagttttcaaattctaaaaataattaatgaggtgagtttatgtgtagtgaacaaaaattttttatatgtgagacttgtggaaaccttgtaggaatgatacaaagtggtggtgtacctattttctgttgtggaaaacctatgaaggaacttgttcctaatacaacagatgcagcagttgaaaaacatgtacctgtaattgaagtggatggaaataatgttactgttaaagtaagtagcacaactcatccaatgactaaagaacatcatatagcatgggtgtatcttatgactgaacaaggtagtcaacgcaaatgtctagcagtagatggagaacctgtagttaaatttgctttgaatgatgatgataaagtgatttctgcctatgcttactgtaatttacatggattatggaaggctgaactgtaatatttaaataaattgagtcaaagaggaggctataaatgtattttcatacaaatagcctcctataaatttatataaattcaagttttaattttgtttaatgtcaatataatataaggagaaaataatatgtcaatttataaatgtagtgtttgtggatatatttatgatgaatctaagaatgataaaacatgggatgaattaagtgaagattgggaatgccctgtatgtacaaaaggtcgtagttattttggaaagataagcactgtttactatgaagaagatgaaaagatagcagaagacatagttgaaaatgaatctaaattaaatactgaaaaagagggagatttaaattacttaagtacatatttaagaagagatgatgaagttgagaaacatatggatataattcacgaaatggctgttacaggaaaatctataatagaacctatgagaactaaactaccagtaatttcttgggatgatattttaattatgggtgctcaattaaatccattacctttaaatgagcatgatgaagtaaatacaacaacaataataggaaaaaaagcaaagaaacctatgattatagaaaatccagtttatatttcccacatgtcatttggagctttgtctaaagaactaaaaatagctttagcaaagggtgcagcccaaaataagacagctatgtgtagtggtgaaggaggtatattaccagaagagaaggaagcttcatacaagtatatttttgagtatgtaccaaataaatatagtgtaactgaagaaaatcttaaaaattctgatgctatagagataaaaattggtcaaggaacaaaacctggtatgggaggtcatcttcctggcgaaaaagtaactgaagaaatagcaaaagtaagaaataagcctgtaggtcaagatgtaataagtccatcttgttttgaggaaatacaatccaaagaggatttaaagaaacttatagatgaacttagagaagtttcagaagggcgtccaataggtgttaaaatttcagcaggtcatattgaaaaagatatggaatttatagcttatgctaaacctgattttgtaactattgatggtcgtggtggagctactggagcaagtccaaagttgcttaaagatgcaacttcaattccaacaatatttgctctttatcgtgctagaaaatacatagatacacatggattagatatagatttggttataacaggtgggcttcgtatatctactgattttgctaaggcaattgctatgggggctgatgcagttgctattgcaagttctgctcttatggcagcggcgtgtcaacaatatcgtatatgtggttctggtaagtgtcctgtaggagtagctactcaggatgaggaattgagaaaaagattacatatagaaaatagtgctaatagagtggcaaactttttaaatgtaagtttagaagaacttaagacttttgctagaatttctggtcataaagatatacatgatttaagtgttgatgatttatatactgttaactctgaaatatcaaattatacaaacatacagcatgtatagattgaagtttgaaactattagattttagatagctataaaagtaaatgataaatatattttataaaagagagtgtcttaaaatgaactttttagttcataagtcactcttttttgtatgaagccaaatatatttatcattttagcaatgaaaaagaatcttatctctttattttgagatagactccttctatttatgaaaattaaagatattaaattgtaaaatattctgtgatgtcgtactattaaactaaagattctgtactttaaagtaaataaaaatttaaggagtgcttattatggaaagattgaagatacaagttttagttgacaataatacttatattgatagatactttgttggagaaccagcagtaagctattatattgagattgatggaaataggattttgtttgattcgggatattcagatgtattcatatcaaacgctgaaaaattaaatatagatttaggaaatttaactcatgttgttttttctcatggacataatgaccatacaagaggtatccagtttttagaaaataggtatgatttatctacagttgaacttatttcacatcctaactgttttatacctagaaaacatggagagaaaagcataggagctccattttctgctgaggaaattaaaaatatttttatgtataatcctaaggataagccatttaatctaagtaagaattgtgtgtttttaggtgaaataccttctataaataattttgaaaaaagagctaaaattggtaaatgtaaaataggagatttgtgggaagatgattatgttttagatgattctgctatagtttgtaaaactgataaaggtatttttattgttacaggatgttctcatagtggaatttgtaatatagtagagtatgctaaaagggtatgtggagatgatagagttattggtatactaggtggttttcatctttttgaattgaataataggttagatagtacaatacaatatttggataaagaagaaataagaatgttgtacccttgtcactgtgtttcttttaaggtaaaagctaagatgaatgaaatattgaatataaatgaagttggagtagggctgaccataagtatatagtatttgaaagtatataagatttaagttgaaggttaaaaagatattttctatataaagtatcttttttgttacgtttattttaagagaaatcaatatacttttatatgaaatattgtaaaaaaatttatttttaatgagaatatattttcattaataaacaattttattatgtattaataatgctagaataaatataaataaatcaaagttacttacattaaagtatattttttcacaaaatatattgatttattcttttaaagtttgataattccaatgaatgtaataaaagaagggattttatactatacaattattattataaaattataaagaaaaaattaaataataataaagaaaaaatgtataatatttaacattaaaaaagatatttcataaaattaaaaaacaaagtgaatttgaatactatttaaaaaataaaaaaatatataaaaaatatttaatacaaaggtagaaataagttgaaaatgtaaagtcattggaaaaatatagttgaatttaatgaacaaaaatgttattgttttatcaatgaagtgttaaaataaaaactttcaatatcattttagggaggatgatttcatgcaaaaaagtgtaaagaaagcaaaagtaacgggatctatgttagccatttttggtgttgcaagcgttctttttagttcacatgcaggaggaggatttgctacagggaatcaagaaactcagtactatgtgcagtatggatggacagcaccacttatggcaattttagcaatgattatacttactgctaccatgagagaagttatcataatgtataataataacaattgtaggaattataaggatttattttgtgagctttggagaccatatccaaaacttgaaataatatgggagatatattactatctaatggttttaatagctgtaagtgctgttatagcaggtgcagcagcagtatttcaaagtataggagtaaattattttgtagctgtatttattattggagttgtacttcttgtctttactatatttggtgctatgcttgtatctaaagcagctacagcaatgacaatagctattctagtatgtactcttactatttttattgttggtataaaagctaaagtaccagaaataactgaaatattatcaaatagaacgagtttcacacctggctatatcaagccaatacttaatacttttatttatgcaggttttcaatcggttgttatacctacacttgcaggatgttcaagaccacttcttaagaactcaaaagaagctactaaggcaatgataatttcatttgttatgaatgcaattgcattaggacttgctgtaactatgctaatgggatggtatagagaaattattgctgctgggcaaacaacactccctactctttatgttgcaggtcaatctggaaatcatactatatacataatttataatgttgcattattcctttgtttaatgtctacaggagtaactactatatttggtcttgtaaatagatttgaagaccataaagcactttctttcctttcttcaagaatgaaaagaagggtatttacagcttgtgcaataatggtagtgtcaatgcttatatcacttacaggattaagtaatattgttaaatatggatatggatattgtggttatcttggtctattcactatagtaattccattccttacactaggacattataagaataagaagtttgcaaaggaaaatccagaagctaaatggccagcggaattaaatgaaaatgtaaattagatgtagtagcaaaaaatattgctaaagagaatactataaataagaatactatagataatatatctgcatgtttattaagattatttgcaaaatctaatattgaacaactataaacaagcaatataaaactaagaataaaagataaaaagagggtgtctcaaaatggacttttagtttataaggcactcttttttatatgaagtcaaatatattttcattattttgacaataaaagagactaatcctactttggatagcctcttttttctttaatataaaatagtataacagcaaagtatagattgatacatgttttctgtagctttctatatattacagtgtttgtgtggcattggtattttaagcaatctataaattataattctataattcttctactaattttagattctatagccgtctctatttcacttaacattcgttcatttttagggtcaataaaagcacatgtatagccttcttcaccagctctaccagttctaccaatacggtggatgtagtcttctggtgtttctggtaaatcgtaattatatatatgacttactccagatatatcaaggccacgagaagctacatctgtagctattaagtattgtatatctaaatttctaaatgatttcattattctttctcgttttgattgagcaatatcactatgaagtttttgacaattatatcctcttatagcaagagcttcttcaagattgtcaacccttctcttagtcctacaaaatattattgccataaaaggattatcttcatctagtaccttacataaggcatctaatttttttctatctgtagtttctactacttcttgttttatattattaagagtgatttcttctttttgaatagaaactacaacaggattttttgtgtatctataagctaatttttttacttgagaatttatagttgcagaaaagcatagtgtttgctttttgtttgaagtctcttttaaaatagcttccacttcgtttttaaatcccataagcaacatttggtctgcttcatctaaaacaaaagtctttaacttactaaggtctattgtttttctatttagatggtctaaaagcctacctggtgtagctataatcatatgaatatttccttttagtttctttatttgagaaccaatatcttttcctccatatgctgcaagaatacttacatctttagattctttaagtttcatagcttcttctgttatttgaatagctagttctcttgtaggagaaagtataagtacttgtatatcatttatatctaatgatatattttcaaatatcggaagtaaaaaagctagtgtttttcctgttccagtttgagcttctgctattacatcttttccttcttttattagtttaatactttctttttgtataggtgtaggtgttgttattcctgatttttttagaatatttattgtattttcactaatccctaagcttttgaaatccattgttatcttacctttcatgaaaaattttcttttttattaaccaattaataatatcatatttgtaagtatttttagtaaattttttaattattatttatatagcttaaaaatatattaagatactttaaaatggaatgtaacttaacttaaattttagtaggaattttataggtttatttttaaaggttttttgaaaataaatctatttaaaaattaaattaaaatgcaagaaaaacataataactttcatttttaagaagttttcacaaaaaagaaaaaatatagtgcaataaatgatacaaagtaatataatagattacaagatatgaaaagctaaaaaaataaattgcaaatgaaattaaaatgaataaaaaataaaaaaataatcataagttagaggtatcaatgaaaaataagacttaatgtttttaaaattaaaagtatactaaggggggcattaatatgtgcgttatatcaaaagatagagcaaaggaaataaaaatagtagatactactttaagagatggagagcaaacagctggggttgtatttgcaaatagagaaaaaataatgattgctgaaatgttaagtgacctaggtgttgaccaaattgaagttggtatacctactatgggtggagatgaaaaaaatgtaataaagcacatatgtagtagaaatttaaaatcagatataatggcttggaatagagcagtaataaaagatgttgaagaatctatttcttgtggtgttgatgcagtagctatatcaatatcagtatctgacattcatatagaaaataaattgagaacttctagaggctgggttttagaaaatatggctaaaacagttgaatttgcaaagaaaaatggattatatgtttcagtaaatggagaagatgcttcaagagcagatatagacttcttaactgaatttataaatgttggaaaacaagcaggggcagatagatttagatactgtgatacagtaggagttatgaatcctttttctataaagaatgcaatagaaactctttatgaaagaactaattttgatatagaaatgcatacacataatgactttgggatggcaactgcaaatgcacttgcaggaatagcagcaggagcaaattatgttggtgttacagtaaatggattaggtgaaagagcaggaaatgcagcattagaagaagttttaatggcacttaagtgtgtttataaatgtgatttaaataatatagatactagaaaatttagaggaatatgtgagtatgtagcacaggcatcaggaagaatacttcctacatggaaaccagtagttggggataatatgtttatacatgaatctggtatacatgcagatggagctttaaaagacccgcataactatgaaccatttgacccaagtgaagtaaatcttgaaagaaaaatagtaataggtaaacattcaggaagagctgcagttataaataagttgagtgaatatgaaatgtatatttctccagaaaacgctaccaagctattaaatgctataagagctacatctataagattaaaaagaagtttaatggataaagaaattcttcaattatattgtgatatactagcacatgagaaaggcacaacagaagaagaagcagttagaggttcatatatttaagatataattgtttaggaggaaaatatgggagataatatagtttataaaataattaaaaaacatatagtagatggagaagctgttgctggaagttcaattggtataaaaatagaccaaactttaacacaagattctactggaacaatgacatatcttcaactagaagctatgggaatagataaagtaaagactaaaagaagtgtggcatttgtagaccataatatgttacaacaaggatttgaaaatgcagacgaccataagtatatacaaacagtggcagataaatatggagtttatttctctaagccaggaaatggtatttgtcatcaagtatttttagaaagattttcaacaccaggagatacacttttaggttctgatagccacacacctactgctggaggtgtgggcatgatggctattggagctggtggattagatgttgctttagccatggcaggaggagcatactatataaaagcaccaaaagtctgtaaggtgaatctagttggaaaattaaataatatggtatcatcaaaagatataatattagaagtgttaagaaaacaaactgtaaaaggtggagtaggtaaagtttatgaatatggtggagaaggtgtcaaaagcctatctgttccacaaagagctacaataacaaatatgggggctgaacttggagcaactacttcaatcttcccaagtgatgaaaaaacactagaattttttaagagtcaaggaagagaagacgcatggatagagttaaaaccagatgcagatgcagtttatgatgaagagattactataaacttggatgaattaaaaccattagctgcaaaacctcatagcccagacaatgtagatgaagttgaaaatataggcaagattaaaatagaccaagtggcaataggaagttgtacaaattcttcttatgaagacttaatgaaagtagcacaaatcctgaaaggaaataaagtacataaggatgtgagtttggtaatagcaccaggttcaagacaagttatggagatgattgctagaaatggggctttggcagatataataagtgctggagctagaatactagaaaattcttgtggtccatgtattggtatgggtcaatctccaggtactgactctgtgtctttaagaactttcaatagaaatttctatggtagaagtgggactttgtcagcacaagtatatttagtaagtccagaagtggcagcagtaagtgcaatcaagggagtgcttacagacccaagagaatttgatattaaatttacaaatttagatgtaaatgaatttttgatagatgatagcatgataattaaacctgctgatgtaggaagtaatgtagaagtagttagaggacctaatataaaacctttccctcttaatacagagctaagtcagtctataggtggaaaagttatattaaagacagaagataatataactactgaccatataatgccatcaaatgctaagttacttccttttagaagtaatataccgtatcttgcaaactattgtttcaatactgtagatacagaatttcctcagagagcaaaagacaataatggtggatttatagttggtggagataattatggtcaaggttcaagtagagaacatgcagctttagcaccattatatctaggtgttaaaggggtaatagttaagagctttgcaagaatccacaaggctaacttgataaatagtggtataattccaatggagttttgtgatgagaaagattatgaaaatatatctcttttagataatctggagataccaaatattttagacaatctaggtagtggaattttagaagttaagaatacaactaaaggaacttcttttaaggtcaaagtagaattgtcagcaaaagaagttgacgtattaaaagctggtggaaaattaaactacactaaaaatcaagctaattaatatgaaaagagggaatattgaatgtataaagtgacacttataccaggagatggaataggaccagaagttgcgaaagctatgaaaaaggtagtagaagctactggagcagaaatagaatgggaagaagttaatgcaggagaggcagttattgaagagtatggtactccacttcctgaatatattatagatagtataaaaaagaacaaaatagctataaaaggcccaattactactcctgtaggtaaaggatttaggagtgtaaatgtaactttaagacaggcattagatttgtatgtcaatttaagacctattaaaagttttaaggggataaaatcaagatatgaagatgttgatttagtggttgtaagagaaaatacagaagatttatatgctggaatagaacataaaataggtgattatgcagctgaaagtataaagataataacaagaagtgcaagtgaaagaatcgttgattttgcatgtaactatgttaaagataataagagaaaaaaagttacagctatacataaggcaaatataatgaaaatgtctgatggattgtttttagatgtgtttagagaagttgcatcaaaacatggtgtagaatatgatgatttgattgtagatgcagcagctatgaacttagttttaaatccagaaaattatgatgtaatggtaatgccaaatctttatggagatatactatcagatttaggtgctgggcttgttggaggtttaggtataattccaagcgcaaatattggtaaagattgtgcgatatttgaagctgttcatggaagtgctccacaaatagcaggtcaaaataaggctaatccaacagcacttattcaatcatcagtaatgatgcttagatacttaggtgaatatgaaaatgcacaaaaaatagaaacagctttagaaaaagtatttcttgaaggaagtaaattgactgtagatttaggtggctcagcttctactacagagtttgcggatgaggtgtgtaagtatattgtatagattttatttagggaaaaagtgaaatatagattgaaggaaagaggctttctcaaaatagagataagcctttttttattggaatgataaaatatatttgattttatacaaaagagagttcctcataaacgaaaaagttaattttgggatatccattttaattttaaaattaattgattaatacgcaaagaaagattaaacaaatttattatttttaattgaactttcaaccaaaatatggtaaaatttaaaaaagttgaactttcaactaaaaataaatatattgattatgtgaaattctataaaacagaaactatttgactttagtcatggtaggttcagtggaggtgtgtttgattaagactttagatagtaatatattaagagaagtaggtactttatctagagcagtaaattcaataaatgatattaagtacaaggaattaaagttacaaaaaggacaatttacatttttgacaagaatctgtgaaaatcctggtataaatcttgtggaattatcaaatatgttaaaggtagacaaggctacaacaaccaaggctatacaaaaactaataaaggcaggatatgtagataaaaagcaggatgagtttgataaaagaggatataatttaactccaactgataaatctttggaagtttatgagttgataattgaagaagagaatagaagtatagagatatgttttgataattttacagatgaagaaaaacaagtggtaactaagttattagaaaaaatgagcaaaaacgtagaaaatgaatggtttaaagtaaagagatagtaaataaatacattaacttaaggagatatttttatgattagaaaagcgaatatgaatgatttagaaagcattatgaaaattataaaatctacagtggaagaaatgaagacttataataatacacaatgggatgaaaactatccattagaaaaagactttgtttcagatattaagaaacaagatttatatatttatgaagtggatggagaagtagcaggatttatatgtcttaattatgaagagccagaagaatatttaggcttaaattggtcatctaataaaaaagcaatggtaatacatagaatggctgtaaatccaaactttagaaagacaggaatagcatctaagttagttgattttgctgaaaaattagctgtagaaaacaatgtatcatacttaaagagcgatacatattcaataaactcaaaaatgaatttattacttacaaagtgtggttttataaaaatcggagaaatgagttttttaggaaaggagaaatctttctactgttatgataaaatattataaagagcatttataatacaaggggtaaataatagattttcagcattagtaagggcataatataacccagtatatgctattatgaaagggatgatttatatgattggatttctaaagaaaagaagaagtattagaaaatacaaggatgttgaagtagaaaaagaaaaattagataaaatattaaaagctgctcttttagctccatcatcaaaggggcttagaacatgggaatttatagtggtagatgataaagaaaagctaattaatttatctcaatgtagaactaagggtggtggatttttcttaaaaaatgcacctttagctattgtaattattgcagataaagaaaaaaatgatgtttggatagaggatgcaagtatagctgcttcatacatacaacttcaagctcatgaactaggtttaggttcttgttggatacaagtaagaaatagaatgtatgatgataatatagaagctgataagtacattagagaagaattaaaagtacctagcaagtacagtgtagaatgtataatttctataggatattctgatgaagaaaagaaagcatacaatgactctgatttagactataaaaaggttcattttaacaacttttagtatataatatgttgtattaagacattatatttttttctattgttaatatatacttaaaattgtaaaaatatatctgaattttactaacttatctaggggttatgtacaaggattttaaagataaatatagaaattaatgtttataatcgatacataacttgagtaacaaaatttaaggaggttaaagtatgggtatatttaaaacaaaaatggatgaggactggaaagtaaactacattaaagagtttaatgaaatgagagattcttatgagagtaaacttcaaaaaaaacagtttgaggtagatagtttgaaatcagaattggatagactaagaagctataaaaatagccttaagccaaaagaaaaacaaattactgatgatgatataaataatataaagagtttaagaagagatggcttaagctataaagaaatttcaaatcaaacaagttggagcaaagcaactgtaagtagggtattaaatggactttacgattagcatatacatggggtgatttaaattgggatgaagtatagttacaaaaaatgcataatagattctattttattgatgtttataattcaaatattaaggatgattttgaattatgtacttctaagtcaatttgaatttactcttgaaaattttaatattataaacttaatttcttttacattagttggtttatcgttaattttatttttaaaagataattctttgtataacaaggttagaaatagaaaaatcacagaagcttttgaagaaaataaaaacaatatacttattgaaaagtgtaagcttatactttttgttgtggttttatctttagcaataattgtaacttattgtactaagggatatgtactttttaatgtaactatgatgactttgtctgtattgatagttccaatatttgaagagttattttttagagaatatatatggaactatctaagtaattttataaagtcaaagagtaaaattatctgtataacatctatactatctggaatttataatataggatacatagatgttataagaaattatgtaatattgtataacaattcaagctacacctttgaagttattatttcaaaaattatgataggtactgtttttggtattgtacttggattagttaagtataggtttagagatgtagggttttgtatattattgaggagcttatttgctatatttattaggtagatagtataatcggtttataaggttgttttaaatttaattttaaatcaaccttattttatttgtgttttataaaacacttatatattaataactaataaatttaataaagattatttgaatatttttaaaatatataaatatgtattgacatataaatattatgaattacaatttatataaactaataaaaattaaataatattaatcaacttattgaatggaggaataaaaatgaaatttgtgactttttgtagtagcaatgaagaaaaaataggtgtatttaattcagaaacaaatagtatatatgaaattaatagtttaggattaagtaaattatatactgatatgaatgattttattgaaaacgtatctacaggagatttagaaaaaataaaaaacaattcatttgaaaacgcaaagtgttataagttagaagaagttaaattatgttccccaattgtaagacctaaaaaagatattatatgtttaggtctaaactataaagaccatgtcaatgaaatcccagatggagttataaaaaacgtagttatgccagattatccaatttatttttctaagagagcagacaaaataattggagtggatgataagataagcttacatggagatttggtagagaagttggactatgaatcagaacttgcagtaatcataggtaaagaaggtataaatatatcaaaagaagatgcttatgaatatatatttggatatacaatagtaaatgatataagtgaaagagcacttcaagataaacatgttcaatggtttagaggaaaaagcttagacacacatacatctatgggaccttgtatagtacataaagaagaatttgaacatcctttaaaattagatataagtagtgtagtaaatggagaagtaagacaaaattctaatacagagtactttatatttgatatacctactataataaatgatttatcaagaggaatgactctaaagccaggagatataatttcaactggaactccagcaggggttgctatggggatgaatcctcaagtatatttaaagcatggcgatatagttgaatgtaaagtcgaaggaataggagttttaaaaaatatagttgattaatggataaatatgccatataattttattagtacaaataatttaattaatataggattgatcaaacttatgattaatttattatagagagggatgagtatatggcaagagaactagaattaaagtatggctgtaatccaaatcaaaaaccatcaaagatttatatgaagaatggagaacttcctatagaagtattaaatggaaaacctggatatataaattttttagatgcatttaatagttggcaacttgtgaaggaattaaaagaagctacaggtcttccagcagcaacttcatttaaacatgtaagtccagcaggagcagcagtaggggtacctttatcagatactttaaagcaaatatattttgttgatgatttagagctttctccattagcttgtgcttatgcaatggcaagaggagcagatagaatgtcttcttatggtgattttatagcactttcagatgtatgtgataaggagactgcaactattatagcaagagaggtttctgatggtataatagctccaggatatacagatgaagcccttgaaatattaaaaggaaaacgtaaaggcaactataatattgtaaaaatagatgaaaattatactcctgagcctattgaaacaaaggatgtttatggaattacttttgaacaaggtagaaatgaaatattaataaatgaagaactattaaaagatattccaactgcgaataaaatttttacagatagtgcaaaacgtgatttaattatagctcttattacattaaaatatacacaatcaaattctgtttgttatgctaaagatggacaagtaataggggtaggtgcaggtcaacaatcacgtattcattgtactagacttgcaggtaacaaagctgatacttggtatcttcgtcaacatcctaaagtattaaacttaaaatttaaaaaggatataggtcgtccagatagagataacactattgatgtatatctttctgatgattatatggatgtgcttgctgatggcatatggcaaaacttttttgaagaaaaaccagagcctctaactggagaaggaaaaagagcatggcttaaaactttaacaggagtagcacttggttcagatgcatttttcccatttggagataatatagaacgtgcaaaaagaagtggggtaagttttatagcacaaccaggtggttctattcgtgatgataatgttatattaacttgtaataagtataacatagtcatggcatttactaaaaatagattattccatcattaaaatactgaaagtataaagataatatagattaagtaaaaatctacaacaagttttgttgtagatttttttatttgctgtataattttaaatagaactttatttttagatattcaatttggaggttgatatggctttaaatataagaaactatagcctattatgtaatcaaggaacagctaaatttaatgaagatgtagtcggtataaatccatttggggcatgggttttagatggtgctacaggacttaatggaaaaaatttagtgtcaaatgaaagtgacgcaaggtggtatgttcagtggtggaataggtatttatataaaaatataaataaagaagaatcattaaagagtattattaatactggaataatagaagtaaaaaaagagtatgaactaagattaaatgggtttaaggttgaaaaattagatttaccatctagttctatagttgttgtaaaatttcatgaaaataaagtagagtattttttattaggagattgtgctttgtttattaaaaatggagattccaaagttataaaagataggagtatttgtaaatttgataatactgtatttgatgaaatgagtaaactttctaacttggaagagatggcatttgatgagattagaactagtgttatggatacaatagtaagcaatagattgaagaaaaatacgaaagagggctattggatattggattttgatgaggaagctgtggaaaattctatatatggatacattgaaataaaaaaagattttcaattgatgctaacgagtgatggttttacaagtgcatgtgatagatataatctaataaaagaagaagaattgatacgtatagcagaaaaatttggtataggatatatacataataaagtaagggattttgaagataatgactataaagcggttaaagtgccaagatttaaaataaaagatgattcatcttgtttatatttagatatatataatgattagactgtataaaactatttaattttagaaaggaggcaagtgaaaagtgaaaattcttcatataataacacaaaaaccaaatagtacaggtagtggtatatatttgtctggtatgataaaagggttcgaaaaaatcggtcataagcaagctgtaattgcaggtatagatgtaaatgatgatgtaaattgttttccaagtgaagtaagtttttatccagtaaagtataattgtggggagttaaattttcctgttgtaggtatgagtgattctatgccatatgaaagtacaagatataaagatttaaatatagacatgataaatagattgaaatatcaatttaaagtaaatatagataaggctatgaatgattttaaaccagaacttataatatgtcatcatttgtacctcttaactgcatttgttagggaaatagtaaaagatataaaggttatgtctatttgtcatggaacttgtttaagacagttaaataccattgatttagagaaagaatacataatagcaaatataaggaaattagatttaatatttgctcttcatgaaaatcagaaatatgatattataaagacttttggagtaagtgaaagtaaagtagttgtaattggtagtggttataatgatgatatattttataataaaaattataaaataaaggatgataaaataaaaatagtatttgcaggtaagatatgtaaatcaaagggattgattccatttataaaatctatatctaaattaaaatatagtaaagatttaatagaagtcaattttgcaggtactggaagcgatatcgaatcatataatgagatagttaaactggcaagtaagtctccatttaaaatgaatttcctaggaaagttagaacagagagatttagctgagctattcaacaggtcacaaatatttgtgttaccatcattttatgagggattaccagttgtagttttagaagctttatcttgtggcacagatgtaatcactactgatattcttggtgttaaagagtggattggtagtgagattaataattctggaaagatagaatatatttctctaccttttatggagaaagaaggtattccaaaagatgaagagttatatgattttgaaaataatttgtataatgcaatagattctaagatacaatctttattgaataactcaaatgagaaaacatctgtagatatgtcaaaaaaaacgtgggatggcttagcatatagaataaatgaagttattttaatggatgaattgtgtttagtctaaaattatttaaattataaaaaagtgtaactatttttaaactttttttaaatgattttatattatactaatactaaatatatttgttttagggaggtaatttatgaggattagtaaaaaggtattggcgttaggtatttcagcattactgttaagtgttagttttccaacatcaataaacgcactagataagattgaaaatattcaaggagtagataaatatgaaacagctgggcttatttcagataagcaagattttacaacagcagttcttatcaatgcagattctacaatggtagatgggattgctgcaagtggtcttgcaggagtaaataatgcagctattttattaactaataaggatgatataccagaagcaacacttcaaagactgaatagagttactaagatatatgtaataggtggagaaaattctataagtaaagatgtagaaaaaatgttacttatgagaagaatgcaagttataagaattgatggtgtagatagagtagatacaagttataaaattgcaggtgaaatagaaaaaattaaaaacagtgataagatgtttttagtaaatggatttaaggatgaagctgatgcagtaagtgttgcatctgttgcttatagagatggagctcctataatattgacaaaagatataccttcagcagaagaagacacagacttagacccatggtttggagtttctcctgttccagtatatgctattggaggagagtctacattaagtgattacatagtgagcagatatagagcaactagaattggcggtgttgatagatatcaaactaataaaaatgttattgaaaagttctataatggagcaaaagagttctatataacaagtggagacgatttagtttatgctttagttgcatcaccacttgcaaaaaatgctcctgttgttttagtttcaaataaaagtgataagagtatattaagtggagctagtaaagtaacagcaataggtataagtgataagagtattatagagcaatgtttggatgctgtaaagaagtaatggagtgttattagtaaaatgaatatatacattgaaaattagtagattgttcattttataatggtataaaatatatgggaagaggctatcaaatggagataagcctcttttttattgataaaattatgaaaatatactttattttatataaaaaaagtatctcatgaactaaatgtctattttgatatactatctccttttcttatattatatgtattatatgattttttatatggaataaatttcataagtattatcttcctttaatttttctaaccaaatcatctctaaaatatctagttcttctaaatagtctttctctgttttgttatcatcatgttttataagttctaaaacttcaaatgtaaatgctttttcaccatattttttccattcattatttaattcttttatcatacatgagccagcaccaagctgaaatttgagagagttaaatttgctttttatgtcattactttttccaaggtaaatctttttagtaatatcattttttattatgaatacacctgtgtcaaatttcatttctttgtataattgttttaattcacgttttctatccatgattttagatacctctctttataattgatatgtaatatgtaagtttaaaaatatattacatatcaattataaagagattaattttatatgtaaatagtttttataaatttaattatgaattagtcatcaataaacaagaaatttagctgtagaaatccattataaaggctattataaattttaatatgctaaaaatataaaaagaatagttgacagtatagaaaatatggaataaactaaaagtgtaatagtaatacgaaattatatattacattgaaaggtgtgaatgattattatgaataaaaaaatagaattaatagggaattttgcaagtgattggattaggtatagtgattatgaatataaaattactgaagaagatgaattatatatagttccaacagaagatgctgtgtttaccatgtataacccatttgatgtagcagatgatataatagtagatataattcgcataggacaagaggcattacaagatatatcaaaagagacaaaagaaatgaaactaaagaaagaagtacttgaatttgtaaaaaagtatggattattgggtttaatatattcaagtgtatataatagagatatagttggagaagaaagagtactgatgattgaaaagaattatattacaaaagagaatatattgagtacagatgaatatgtaaacatgtttataccatttgcaagtgatgaagatgtgtattttaaaaaatatagaaggggtatagatgtatcaaagagagaagaatctccaaagttttttggaaagagaccattgattttagatttagtattttcaaagttctacactgaacaactagattggattgtaagttttgctaaagatatgtgtaagcattttaatcaaatttgtgtatataaaaatacatctaatctattaactgaaagtgttactattatgtctggagggtttaatcctcaaaagataggattttctataagccaattagataaaccaattattgcatgggagtttgattctttgaaaacagctattgagactatctatgcctttgcaattacaagtgaaccttcttctttaaataaatgcaagtactgtggtaaaatttatattcctacaaattctaaatctcaatactgttcaccttcttgtagaaattgctcaaatgtaaagaaaagtagaagtagagccaaaaaagataaataaaattaataaatatatcattgtttagattttagtaaataactactgaattaaaagttgttatagaaaattatatatctaaatgatggtatttttttgttgagaaaattgaaaagtttaattgagatagtaattttgagttgacaaaaaccacttttaacactactattataagtggttggtaaaataatatacactaatttaaatatagcataaaaaacaaaaaaagtcaatgaaaaaaataaaaaaggagaatttaaaaatgatatcacctattattttgagttctataaatcagaatttaaaggaaatagaaagaaatgaactgcttgaaactaatatagaatctggagattatggtctagctctttctgaatctgatgtaaaagatataataaattcgagagataatactttaaaggggtatggaagaatagaattagatataaaagttacaaaacagttaatagaaaatatatatacatcacaatatacaaatgtggacaattatttagaggctattaatgatatgcaagaaattttttattatttaaaaaatgaaactgatgacaagatatgtgatgatgagattatagaaatactgggtgaattttatgaaaaattttcaggcaatatggacaatgtaagaggagaagcagacgaatttgcaaagaaatttaaatttggagaagtttaatatatgataggagagattttgtatgttaaataatttaagtaatattaatataaacgaaaataatttaataaagaaccaatattccatatctctacttaaggaatgtctaaattgtaaagtgatagatgaaagagaagtatataatatacaacaagaaatatctctaatacttatggatttgattaaaaaatatacaaatggtcaaagcacatcagtaaaaacagaagttgccgaaaaactgttgatttcaatatggtatgctattgatgcatatataaataagcttggagatatagaaaaaagagttgtggagttgactgctaagaatgttaaaaaagtgtaccttggaggcattgaaatattagaggaagagttagttaggctgaaagatttttataaactaatgatgagtagaaaattggatactaattcaatagcatataatgataccttgatggagttatcaagtttctttaaaagttatattgtaaaatttgaagctcaggacgttccagtaagtatagattatccattggcactagatgatatggatgttaagggtatttattatgtgaagaattatattgagagtatagatatagaaaatagattttgtaacctatttaagaaaaaagatagagaaaaattattttatgactatggggtgatttataaaatagattgtgatgttatacttgtaaatttatttgaacttattataaataattgtattttttctactattttaggaaatgaagtgattaatttagaaatttcaaaatatgagtatgaatttttagaaaaacaatttaaaaatatgtacaataatattactgaagataaagttataggctctgaagaaagtaatataattgaattgattgaagtagatgatagttttaacactgaagtagatagtaatttggattataatgattttgaagaaattaacagagaaattagaataaataaaaaaataactttactacttatggaagcaattgaagtattaataaaaagattaagcatagaagatgaagatgtaataagatatattaaaaaatatgaaaagatatttattgaatctgtgctaagctcaataaaaagtaacacttttaaaagtatggtaactgtgagtaaaaataaaaatgaacacttagaagactatattgttgatgatgaaagtaaattggatgatgaatcgtttagagagatattcaatgagatattagatagtacatctataattgaaaaaataagaataataaaggaaaatatcaatgctaaaaaagactttatcgatattcttgaatctgaatgtttatttggagaagagtatttaatgttgtttgcatcattaagtgaattagaattggcaatattgggtagtgtagtattttatgaagatattagaatgagagaaattaatatattagaatttatgttaaatgagaaaactgaaactactttatggaagacagagtacattaaatttatgaagaggcaaagtgaagataagatatactccatagaagagcatatgaataaaattaattaacaaaaaattgtgaataaatagaatgttagtatataatataatctgtaaagcatatcaaaaatacatatatttggaggaaaattatgaaagagtatatcataaataatgttgaagaaataagagaagaattaattgatttatctaagaaaatatgggaaaatccagaattagcctttgaagaaaagtatgcaagtagcattcaaaaagaatacctaaagtcaaaaggatttaaaattgaagaagtagaaaatttacctactggatttatagcaagttttggagagggtaaacctgtgattggcatacttggagaatatgatgctttaccagagctatcacaatgtgtgagtgcagaaagaaagccattggtagaaggaaaagctggacatggatgtgggcataacctgttgggtgtagcaggtgtaggagcagttgtttctataaaaaaattaatagaagaaaataaatttaatggaacaataaaatattttggttgtcctgctgaagaagaaggtggaggaaagacagttatgtgtataaatggctgttttgatgatgtagattgtgcatttacatggcatccttttgatataaatgcaccttggagaggtggaagtctggcaaacttatctgtaaaatttaaatttaaagggataacagcccatgcagctcaagctcctcataatggtagaagcgcacttgatgctgttgaaattatgaatgttggagctaattatttgagagaacatgttattgactctataagaatgcactatgttataactaatggtggtggaagacctaatgtagttcctggatttgctgaaagttggtactttattagaggtaaaaaagcaagggatgcagaacatgttcttgatagattaataaaagtagctcaaggagcagcaatgatgacagaaactgaaatggagtataaggttacagatggaatatatgactatataccaaaccaatgtttgactgatttagtttatgacaatatggtttttgttggttgccctaaaaatactcctgaagaagaagaatttgcaaaaaaattgtgtgatactcttactagagaagaaagattaggtgtagcaacatcattacaaaatgataaatctattgtagaaagttatatacacaaggaaatagttgacggtgacaaagataaaggactagctggttctactgatgttggagatgtaagttatgtaataccagtggctcaatttgcaatggcagcttggcctgttggaattgcaagtcatacatggcagtcatgttcatcagcaggttcaaatataggattttctgctatgataaattcagctaaagtactggcttgtagtgcttatgatgtatttatgaatactaaaattattgatgaagcaaaaattgaatttgataaatcattagatggacaaaaatttaaaccattggtataattttggtaataaaatatttctggggggaatagctatgagagaaaaagttgaaaaagtgcttgaggaaaagataaaaccagtattacaaagagatggtggagatgtagagcttatagatgtaaatgaaaatggtgtggttttagttagactacaaggggcatgtagtgggtgtccaggagcgactatgacaatcaaagctattattgaaaatgttttggtgagtgaagttccaggagtaactcaagtattaggtgtttaatagttagcgtttattaaatgtatgttatacataagtatttaataaagaagtaaaaaaaatagtgaagcaatatatatgaaaaagtatgataaagataataaaacattatagaaataatgaaatatttcatatgtatatgaagaaataagaaaaaatagtgaagcaatatatatatgaaaaagtatgataaagataataaaacatttatagaaataatggaatatttcatatatacatatgaaaaaatagtaaaacaatatatatatgaaaaagtgtgagaaaataataaaatactatagaaacaattaaatattctatataggtattaagaaacatgaaagaaataatggagtattatagataaatatgtaaaagtgtgaaagaaggatgtagataaatttgtcttatacaaatttacctacagtatttcttacacactttttattttactatccaaccataccaataaacatacctataaagtatggaactaaccatatagtccatacaactatactaaacttatgaaagaattttttcttttcctcatcatctttgtataggacaaaagtagcccaacttgcatgaaaaagcataagcacaattgcaagaagacctgtaatactatgaaggttttgtgataaagcagattttacttcaaaagtatggctgttggctatgttactcattgtaaatgttcctaaagtatcaaatataaacccaagccaaaatataattacatgtttcttttttaaaatttttgcctttctttctccaaatacacctatagtgtagaaaattaaagctgatgttataaatactattgcaagtattaatttataattcataattatctctcctttacttttgccaatatatttctaagattttttactaagtcactcaattcgttttcatcacaatttttaaaaatatcatcaaaactttcttgcattttaattttaaaatttgtggcaaattcaaatcctgttgttgtaaacttaacgtatgtatttcttttatcattagatttcttgaatttttctatatatccaatctgttctaatctgctgattatgcctgaaaccgtacctttagctaaagacatttcatcacatagttgtgatattgtaagttcttgattatgagctaccagttttataactataatctgttggtgtgttaatccattttctttaaaattttcttctactgtgtacatagttttagaataaagttcttttaagagcatggctattctaaaacagtcataattacttttcaataaaatcacctcttaaatggtttgcatacaaactaatataatatacttttcttatatagtcaacctaaaattttataattttatagaaaataatgaagaatagaacataaaaattttattttaggtataaataaaataatttgatgaaattttaacaatttttaaaaagtttgtttacacagttaataaatgatgctaaaattaactcatagataaatatagaaaatttaattttgtttaatgataatggaaccacgaaggttttaacgttactttacgtttgcttttatgtggtttttttattgcaacaaaggggggttggggtttgttaaaggatatactgaaaaagttgttgcagtttattttagtaatgtttttattatcttttattgttttttacatggcaagacttgctccaggagacccattaatctcttactatggggatggagtagaaagaatgagtacacaagaaaaagaaaatgctatgaaaaaacttggtttgaatgaaccaatatacagtcaatatataaaatggatttcaaatgcatcaaaaggggaatttggaatttcatttaaatataaacaaaatgttacttctgttataaatgatgtctatataaacactataatattaggtggttcagggtatatacttacctttgtgctagccttattgttaggaatattttgtacattacatgaagataagctcattgatagaatcatatgcaaattaggaacaataaccaactgtattccatcattttgggttgccttagtactcatacttatatttagtataaacttaagtatacttccaagtagtggtgcttattcaatgggagaagagtccagtatattaagtaggatatcacatctaatcttacctcttacagtacttatattaagccatctatggtattacacatatatgataagaaataaattactagaggaaataagagaagattatgtgcttttatgtaaagcaaaaggtttaaataatagaactattgtttttaagcattgcctgagaaatataatgccatcatatattagtataatggccatttcgatacctcatatactaggaggaacttatgtagttgaaaaagttttttcttatcctgggttaggaacactttgttttgaaagtgcaaagtatcatgattataatatgttattagttttatgcttaataacaggggctttagtagtatttgggaatatgttagctcaaattataaacaataaaatagaccctagaatgaaatatgatagaggtgatactaatgaagccacaatatagtgattttgaaattgtaggagaaaattatattttagtagcagaagatgaacatatagaaacaaagaaaaccttatctaaaaaaattaaagaattaccatatatatcaattattattttatcaatcatagtcattggaagtgtattctcatcttttataatgacacatgaaccaacatacatggatttagcaagttctaatttagctccaaataaaacttttttatttggaacagactcaatgggtagagatatatattctatgatatggtatggaggaaaaatatctttatttataggactattttccactgtaatatcaactgttataggaattgtttatggtagtataagtggttcagcatctgaactcgtagatgatgcaatgatgaggtttacagaaatcatacttagtataccttcaatattaattataatatttgtacaagctatacttggaaattcaaatccagtatctatgtccatagtaatagggataacaagttggatgaatatatctaagatagtgagaacagaagttagacaaataagaaatagcgaatacatactagcagctaagagcatgggaggaggattcttctatgtattaaagcaacatttacttccaaattttgtggcatcaataatgttcatggttgtaacaaacataggcgcagctattggtactgaatcgacacttagctttttaggaattggtttaccaatagaaattgtttcttggggaagtatgttatctttgtcagaggaagcattactttcaaatagatggtggattatactgattccgggtatatttttggttaccacattggtgtgtataacaaatataggtaattatataagaaagaataataataaaaaatctagtaatttataaatcagcatttgagtactaaataagcaaatactgaggtatttgaaatatctatttaaataaatggggtcaaagctttgaaaaatattttataaaaagcaaaagggggagcatcatgaaattaaagaagttaaaagttttaagtttagtaatgatacttagtctaatggcaggttgttctagtggaggagacaaagataagaaggcagatacgcctaaagatggaaaggtacttgtttatggaagtaatgactatacaagtataaatcctgcactatatgaacatggagaaataaattcattaatatttaatggattaacagctcatgatgaaaataataaggtggttccttgtctagcaaaggactggaaatttgatgaggcaacaaatacatatacttttaatttaagagatgatgttaagtggcatgatggagagaaatttacggcaaatgatgttaagtttacaatagaaactataatgaatccagataatgcttctgagatagcatcaaattatgaagatataacaaaaattgatgtggttaatgataatactataaaaattactttaaaagctccaaatacagcaatgcttgattatttaacagtaggagtattaccaaaacatgttttggaaggtaaggatatagctactgatgaatttaatcaaaaaccaataggtactggaccatttaaacttgaaaaatgggacaaaggtcaaagtataacacttgttaagaatagtgattattttgtaaaagaaccaggattagataaagtagtctttaagattgttccagatgataaggctaaggcaatgcaattaaaatcaggagaattagacttagctcaaataactcctaaagatatgtctaactttgaaaaagacgaaaagaattttaaagtaaatataatgaaaacagccgactatagaggtatattatacaattttaattctaaattctttaaagataaaaaagctaaaggattaccaaatgctttaagctatgcaatagatagaaaagcaatagttgacagtgtattattaggacatggtgtaccagcatattcacctttacaaatgggaccatataataatcctgatatagaaaagtttgaatataatccagaaaaagctaaacaagaaattgaaaagctaggttggaaattaggttctgatggaatctatgaaaaagaaggtactaagttagctttcgagataacagcaggtgagagtgaccaagttagagttgatatggctaaaatatgtgcacaacagttaaaagaaattggtgttgatgctaaagctgttgttgtaactgaaacagattgggctaatcaagatgctcatttaataggttggggaagtccatttgacccagatgaccatacatataaagtatttggaacagataaaggtgcaaattacagtgcttactctaatcctactatagataaaatacttcaaaaagcaagagaaacagaagataaagatgaaaaattaaagttatataaacaattccaagtagaaatgactaaggatatgccttatacatttattgcttatatagatgcaatatatgttggaaaaccaaacataaaaggattaacacctgatacagttttaggtcatcatggtgtaggtatattctggaacatagctgactggacaattgaataatactgaaattaattagaaaccttagggataaaaatatatccctaaggtttgaatagcataggggttgatggtttttggaacatttattggaggttaataatctatctgtaagttttaaagtagaagaaggagaagttcaggctgtaagaaatgtatcttttaatctaaaaaaaggtgagacattggctatagttggagaatctggttgtgggaaatctgtactgtgtaagagtttgatgaggatactcccatacaatggatatattaaaaatggagaggttttacttaaatcaagtgatttggttaagaagtctgaaaaagagatggaagatataagaggaaagaatatatcaatgatatttcaagaccctatgacatctctcaatccaactatatcaataggaaagcaaattgcagaagctgtaatcattcatcaaggtataagtaaaagtgaagcaaaaaagagagccatagagcttattgaattggttggaattgataatcctgagaaaagatttaaacaatttccacatcatttttcaggtggaatgagacaacgtatagtaatagctatagcacttgcctgtaatccagatgtattgattgctgatgaacctacaactgctttagatgtaactatacaagctcaaataattgatttaataaaggatttacaacataaaataggtttgtcaataatatttataactcatgatttaggagtagttgcaactatagctgatagaatagcagttatgtatgcaggaaagattgtagaaataggaactgtagaggatatattttatgaccctagacatccatatacttgggggttgttgggttcattacctactttagattcacaggatgaatatttatataatatacctggaatgcctccaaatttattgaacccaccaaaaggagatgcttttgcaataagaaataaaaatgcacttaagatagattatgaaaaagagccaccaatgtttaaaattaatgatacacatagtgcagcaacttggttattgcacccagatgcacctgaagtagatgtaccagttagagtaaattgtggaagggtgatttctaatgaatagagaaaaaatactggaaataaaaaacttaaagcaatattttcatttggacaaaagtactactgtaaaagcagttgatgatataagttttgatatatataagggtgagatatttggattggtaggagagtcgggttcaggaaaatctacaactggtaaaactataataagactacatgaatctactggtggagaagtaatttacaaaggaaattgcatatcagataaaaaaacgtacaaatttataaaaaaagatgtaaacaaaagtatgcagattatttttcaagattctacttcatcattaaatccacgtatgacaattgcagatataatttcagagccactaaaaattcaaggtatctgtaaaaataaaacagatagaatgaataaagtatatgagatgctaaagctagtaggacttgatagaagttatgcaaataagtatccatctgatttttcaggtggacaaagacagcgtattggcatagcacgagctctttcagtagacccagaatttataatagctgatgagcctatagcttctttggatgtgtctatacaagcacaaatagtaaatttatttaaaaaattgcaacaagaaaagaatttaacttgtttatttatagctcatgatttatctatggtgagacatattagtgaccgtataggagttatgtataatggaaaattagtagaattggcagattcaaatgaattgtataataatcctattcatccatatacaaaatcactactttctgcaattcctgttcctgaccctagatatgctaagtcaagaaatagaatagagtataattctaatggatatgattgttcaaatgaaaagtcattaagttggattgaggtttcagatggacattttgtatattcttctaaatcagaaataaataaatatcaacaaaatttaaaagttgtttagtataaaaatacttgaacaggtatttatttgaaatacaaactaaaaccctatttttggagaaattttaaaactactccaaaatagggttttttatttctacttttcaaatataataaattcaaatataataaaattaaaaacaagtaaagtatgttgttaagaaagtgctataaaattaaaaatagtaatgtagaaaaaatgagcaataatcttattttttctacaataattttctataatttaaagtaaggaaagtttgataaattataaccttagttaaagaataagagtttattaaaaaataaagtgtgtataggggttttagttaataaaatattataatgtaggggagcttgtaatgatatataaaaaagataaagtaatgaaagttttagaatcatcatatagggaaaatgaaaaagggattacagctaaccaattatcagaaaagacaggaattgcaagaaacaatataagtacatatttaaaccaattattcaatgagggtatggttacgaagataaaaggaagacctgtgtattatatccctgcaaatcttaaccttaacaagaatgaattgcttgatacacaaagtgagttgcttggcataaaaaaaggaacaaaagtagaaaacaaaataaaaaaagatagttttgaaacactaataggtaaagaacatagtttaagacctataatagaaaaatgcaaggtcgcaatgctctatcctacaaatggacttcatactattatctatggagaaacaggagtaggaaagagtatgattgctagatatatgtacgattattctatagatagtggaattagaaaaaataaagctccttttgtaacatttaattgtgctgattatgctaataatgcacaattacttatgggacatatttttggagtagaacaaggagcttatacaggtgcagaatcttccagaaaaggtcttttggaaattgcaaatggagggatactatttttagatgaaattcatagactaccagcagaaggtcaagaaatgttgtttacttttatagataagggaacatttaaaagactaggagatgcaacgaaagaaagagattctaaggtattaataatatgtgctactacagaaaatccgacatcaacactattagatacattcaatagaagaataccaatgaaaatagaaataccatcactgagagataggacaatgattgaaagaatggaattagtcaaaaattttttcaaggaagaatcaaaaagtatttctatttcaataaaagtacataaagaaataattaaatcactattactttatgattgtaaaaataatgtaggtcaacttcaaaatgatataaaattagctgttgcaaatggatacctaagatataaaagagataataaagaaccagtttatatagagaaaaaatattttgataaatctataaatgaagtgagtgatgattatagagagaagtctattaaagcagatgaagttataacacatggaatagaatattttgtatttacgtcattaggagaagaagaagttattaactacaatgatataaatattattaatgcagtaaatactaatcttaataaatctgtagaaatgaatatagcagatgcttctctatttaataatgttaagtttaaaagcatgtgtgaatcaataagacaaattattaaagaagatgaagaaatagatataagtgaatcaatatttaagtcaatggcaatttatataaaaagcgtattggataaaagtagctctacaaacaacatagatttgaatcaaattagaagaaataacagaagtgaatttaaaacagcactaaaaatagttggaataattgaaaatgaatttgatttatttttatctatagaaactgtagcatatattacattattcatagtacaagctaaacaagatgaacaaaataaaatagtgaataacattaatattatagttgctatgcatggagaaactacagcaagtaatggtaaaagcagttggtgatattattggaaagtgcagtgctatttctttcgatatgaagttagataaaagctatgatgaagttattgtagattttaaaaatttaattaataatatagacaataaagatgtattactatttacagatatgggttcattaaactcctttgatgaaattataaagaaagaaaaaaagtgtgaagtaagagtaattcctatggtgacgacattaactgtgttagaagcagttcagaaggccaatatgggattacctttaaatgacgtatacaactctatcactaacacgagaaagtattattttggaactaatgaaattcaaaataaagaaaatctgtctaaaacaattattatagcatcacatgtttcagaaggtgtagataataaaacaagaaaaatattagaagaaaagatgagtaggtacttagatggaatagatattatatctgtcccatataaaacagaaaaagatttaagtttaaatattacaaaacttaaagaaagtagtaatattgttgcagtaatcaatgaacaaagaattaatattagaggaattgactatattagcaaaaaagatatagataaggatgaaaatatcaataaattaaaaaatattataaagataagtataggttatgatgatgtagttgaaggtttaaagacatccttaaaaagctctaattataataggatatttaaagatataaaatatgtgtctgatgaattgtttttagtatttaatatagaaaagaaatacgataaagtaattggacttatgatgcatttagctttcatggtagatgggttgattggaaatactagagaaattgaaaagcttgataaagaaaaaacacttgattatcacaagagcctaagcaaaataaaagatatagtatctcaattagataaaaaatataatatagaaattaatgaaaaagagtgctatcaaatattattaatattagaatatgcagaaataatcgaaaaagattaccaatgagtataaaaacttatttggtaattttttttagtctaaaataatattaatattagacacatataaatatacttagacaaagtatctaagttttgatgataaaaatgattgaaataacagtgttttaaagtgtctaaaaaaactggcataatacttgcttatattattaaatgagtaatataaataattaaaatttaaataaaaaggagtaaataatatgcaagataaaatattaagagataaaaaggcaaatgacccatgggcaagaatgactacaagaaacggatttagtgcagacgaaataatatcgtcatttcaaaaagctataagaagaaatatggtggaagaagcttgtgaatttgcttatgaactatatatatcatcaccagaattagaagataagctatggagaaggatacttacaatatcagttgaagatataggaatgggggacccatcagctgtaataatcataaataatttaaatcaagtaagaaaggaatattcatatgcagatggagacagacctttatttttcatacatgcaataagatatctttgtgcatgtgagaaagatagatcaagtgatttattaaaaaatataattataaaaggatttgcaatgggtaaagttccagaagttatggacgtggcacttgacaagcatacatatagaggattagaaatgggaagggattcattccactttttaaatgaagctagtatagtaataccagaaaaagaagtagataatgattataaagaaagatacttaaaaatattagaaaaatataagcaagaagaagttatagatacggctttcaagtttaatcattggcagtactaagaattagagtaaatattaataagaattaaaataaaataataagaattaaagtaaaaactgataggaattagagtaagaattggctgataaaaaattagaaaataaaagaggttagatattgtaggagggtaattatgaatattttattagtatgtgcaaatggagcttcaacaggtgtacttgtggaaaagatgaaaagtttttgtagtgagcatgaaaagttaaaaactaaaactataaatatagaggcaacatcattcgaaaatttaaaatcatacattgaagctaatgatacagatgtagtacttgtagcaccacaaattaggttcaaggaagatgatgtagttgaagcttgtaagaattacaaaatagcagttggtttaatagatactaagcattatggtcgtatggatgctccttctgttatgaagtcggcaatcgaattatataaaaatagataattggggggaataaaaatggaagcacttcaaaataatttaagaagatttcttctaccaatagcacaaaagattgaaaaacaaaggcatcttcaagctataaaagaaggtatgataagcattaccccaataataattgttggttctttaagtatgttatttatggcattaaacaatatgttacctgaaggaagtgcaaaaacattattatctgaaaatatggatacattacttatccctaataaatttactatgagtttattatctatatattcagcattttttatagctcaggcactagctaaaaaatataatcttaatcatgtagaaataggtatgacagcagttgttgcacaacttgttgtatgtggacaagtagtagatggtgtattagatacaagttatttagatgcacaaggtttatttgtaagtatattagtagcacttttagtagttgatattactaagtttatgaatgataaaaatctcgtaattagatttccaaaagaagtacctagtgtagtaaataaaagttttagaaatttaactccaatgatagtatgtataatgttatttacagcaatagcagcaataactaaaaatgtctcaggtcaaccattaccagctattataatgaatttcttagcaccagctataagcagtgtagataatgtttttgcagtaactataatactatttataactcaattattatggttctttggccttcatggagcagcaataacttcaagtatatggatgccaatagcagctacatatatggcagaaaatgcaacactgatagcagcaggaggagacccaaaatatgtgtttacaataggattttactatggtttcttgcaagtaactggttcagggataactttgggattagtgtaccttatgtcaagaagtaagtgtaagagttttaatagtatgggaaaagttgtgattttaccatcactatttggaataaatgagccagtaatatttggaacaccaatagttatgaacccatatatgtttgtaccatttgtatttggacctgtattggttggagcacttaattttatggcattaaaagtaggattagtaggattacctattgcagaaccaccaggctttttacctccaggggttgcagcatttttgatgacattagattggaaggcaatcgtattagtatttgcaagtataatacttatgaccttgatatattatccattctttaagataatggagaaggaagaattaaataaaaatgcagaattagctacaacattagatgatgatagctttgatttttaacaagtcattagaaggagaaggatatggtacctgaaatggaagaaaaagtatttagtataatatcagaagcaggagatgctaaaagtgatgtaatgatgtctcttaaggaaataaaaaaaggtgactacaataaagcaaaacaccttttaaattcagcctcagagaaaatacaaacagcatcaaagcatcatttagaattactatcaaatgctatgaatagtgaagatagtgggactgattttttagttgtgcactctgaagaccattattcaaatgcattatttgctcattctttagtatctgaacttgtagatatatttgagatgatggacccaagaattaataagaattaaatttcttgtaaatagtgcttgaagtttggctatagtttattaaatcaatagatttaataaatgaactcccttttactttaaagtactagtatttataaatttatttataaatacagtaaatttttaaatagaaaaggagatattattatggaaaaattttcagtagtaatagctggaggaggaagtacatataccccagaaatcatattaatgttgctagataacttagataggttaccattaagagcaatcaaattatatgataatgatgaagaaagacaaaataaggtagctaaagcttgtgaaatactaataaaggaaaaggaccctaatatagagtatttagcaacaacatgccctaaagaggcttatacagatgtagatttttgtttagctcatataagagttggaaaacttgaaatgagagaactagatgaaaagatacctctaaaacatggagtagttggtcaagaaacttgtggaccaggtggaatagcttatggaatgaggtctatagaaggtgttcttgaaaacatagattatatggaaaagtattctccaaattgttggatgttaaattattctaatccagcatcaataatagcggaagctgttagaaggttgagacctaattctagggtaataaatatttgtgatatgccaataggtatggaacataatatagcaaggattgcaggactcaaatctcgtaaacatatggatataagatactttggattaaatcactttggttggtatacttcaattaaagataaaaaaggaaatgaacttttaccaaaattagtagaacatataaaagaatatggttttataaatggtgaagaaggaatgaaaaatgacaagaaagatagttggtttgaaactaatttatttactaaagaaatagtaaaaacagatttaactacaataccaagtagttacttaaagtactatctatttccagattatgttgtaaatcattctgatgtaaattatactcgtgccaatgaagttattgatggaagagaaaaagaagtttttggttcatgtgcattgatagaaaagcaaggacattctaagggcagtgggcttaagataggaatacatgcagagtttatagtggatttagctacagctctagcttttaatacacaggagcgtatgttattgatagttcaaaataatggagctatagaaaatatacaagatgatgctatggttgaaattccatgtatagttggaaaagacgggtatgaaccattatcaatagggaaaataccaacattccaaaaaggtttaatagaacaacaattagcagttgaaaaattagtagttgatgcttggattgagaagtcttataataaattgtggcaagcacttatgctatctaagacagttcctagtgcaacagttgcaaaagaattactagatgatttaatagaagcaaataaaaattattggccaaaacttaattaagaataatatatttttaaagttcctacagtttagtacatagcctagttaatgtatttgtagggactttatttatttacaaatgagatacaagtggcaaacatagtgtattttgcagttaggaaagtaggtttagttacttgttagttggattaaatttaggtacaataatttactatcaatcaatagaaataaccagagaagttgcataataaaaaatttacacttttaacaggatttatgtaggtgtttatagaaataaataaatatgtacataaatacataattatttttaagtctaaaatacaagaatggagagatggctatgaagtggagagattatgctgatgatgtaaatttatttgaggattttgataaaactatcaagcctctaactgacgaacaaagaagaaaaaatataaacactttaattgcatatttttcaaaagaagttccttctaaaatatacaatttatcaaatgatgaaattaagcctagagatatacttagaggacttttgaatgtatatccaccaaaagaaattgctccagagatacttaatatgttacataatttattgttgattgaatgtgaagaaagagagttagtagatgtaaatgatatagaagaagtagaggaagggattgccatatggagaggtaatataacgaatttaagagcagatgcaatagtaaatgctgcaaataacaagttattagggtgtttacaaccattacatctatgcgtggataatgagatacattcatgcgcaggtcctagacttagagaagattgtgacaaaataataaaaaaacaagggcatttagaatatactggagatgctaagataactagaggctattgtttacctgcaaaatttgtagtacatactgttggacctattgtatctggtggtcagccaagtaaagagcaagaaaagcaactgcttcattgttataaatcatgtttaaatacaataaaagaaattgatgaaataaaaaatattgttttttgtggaatttctacaggtgtatttggttatccaaaaaaagaggcagctaatcttgctgtaagtagagttagactatggctaaaagaaaatcctgaaaaaaatttaaaagttgtatttaatgtgtttactgaagaagaagaagagaaatatagaagaatatttaaataatattatgtaacagaatcctaaaaatacttattatataatacaaattcattgtataagataataatttacaagtagtaaaaattaataaaatataatttgtatttttaataaataagtaggtataatagaaattataagaatagtataatcaattatgctattacttagaaaatataatataggaaaattgtatggtaaataaatatgaaaaatagttttaaaaattgtattagtttaagaaataaatttataattatatcaattgtgtttctattaatcctattaattgtatcttatatatttggcaaattagtgtataatagttcggttggtttagagcagttaataaaaaacgaagatatagtaaaaatattttctgagagaaaagataaaccactggagaaattaaaaaactacaagacatctgaattaatgatacaaagttctaataattacaagcttgaaagtctttttataacttcaaatataaagacaagagatactatgatacttgttcatggaattggaagtagttactatgaaatgttaaaggtagcatatagatatttagataaaggttataatgtattagtttataatcaaagaaatactggtaatagtggtggagataattacacatttggtctttatgaaaggtatgatttagatagtctagttaaatttgtaaaaaataaatttcctgaaggaagattaggagtgcatggattttccatgggagcagggacagctgctatgcattcagagataaattcaaaagatgataaggtcgatttttatatactggattctccttattctgaaatgaaagatgcaattagaatgggagtactagaaaaacgaataccagatatattaatcaattatgtggtgatttgtggagatttatataataagtttaaatctggattttggtacagtgatgtaaaaccatatgagtcagttgagaaatctaatgtacccatactgtttatacatggaacaaaagatactgtttgtaattatcaaaatagcaagaaaatgtatgatttagttaaacatgataaaaaagacctatggcttatagaaggtattggtcatgttgatggatttgaacatgatagtacagtatacttcaataaaatatttaaatttatagatagtaatgttttaagtgataaaagttaattgaatattagtagcttatttatttttgtatttattaaaaaatagataggctatttttatgtttaaatataagttttgtttagtaatgtgaattaatttctagtaaaaatgaaaataactaccaattaaattcatttatacctcaaataaaagagttagtattagattacaatcaaatctaaagaaaagagaggtagtatatatgaaaaacaaaaataataaagataaaaacatgttgaatattaaagtattgagagttctaggagtgctattaatactttttgattatacgggtgatactttgaatttttataatttcttcgcaaagccattagtatcgggtaatttatataagacaacaggtactgactgtattgtatttttattatttattgtagagtgtgtatacctagtgggaagatatatattaaaagttaagataaattggagtgagattattgaaaatgagaaaggtaattttataaataacttgttggttgaaaaaatacaagaagaaagcaacattgtatataatttattaaactcatatgtgttgccacatatatataagaaagcaagggtgttgatgtttaaaacatatcatatgttaatctacattaaagaaaaatactattatgtaaatatatattaatataatatgattgcacaattaattatattatattttgtattggatgataaaatgaaagacataaattttttgagacactaaaatcgcaatttatttcgtgtttaagttataaattttgtgaaaaattataaatcttataaaatagattgcgattttaatcttaaacttttgctatagtttttccagtatcagttaaatcatatccgccaagaccttgaagttcagctttaaactcaggagagtttattatgttaattatagtttggtaaactggattttgtaagtcttcttttttaataactaaatcatagcgctctttgtgaagaggaataaagtcgatattatttacttgtaaagcagctttttcatttcccaaaccaacatcagctattccacgagaaacagtacttgcaactccaagatgtgataattcttcattatcataaccttttatatgtttaccattaaagtttagaagtctaagtttaccatctagtaaaaccctagttccagaacctttttccctatttacaatggttatacttggttttgttaaatcctcccaggttgttatctctttaggatttcctttagcaacatagaaaccttgcattctataagctagatttataagtacacatggtattcctggcaatagctttttaacaaaagtgctattatattcatccgtttcgaaatcccatagatgggatgatgctatagaaactctgccattatataactcatacaaagcattataactacctatataagagcgaaatgtacttattccatccaattttttttcaacagacctagctaaaatgtctaatattacatcttgaccagaaataataattttgaaattattatttatatctatatttttattgttgaaatgtgtatcctttactttaccagttttttggctgttgatatattcttcaacatctttagtatcaactcttatttttttccctactttataagaaggaagttcacctcttttgattaattcatatacagtattttttgttatctttaataattcagctacctcgacaggtgtcaaagatgataatgagtccataatccacctccatataaggttattttaacattaaaaaaaggaaaatgtagcaaaatatttaaaagtagtgtaaataaattacttgaaaatttattatcatgtatatataattaaactatatataacaaaacatgataaaacataataaaacatattaaaatgtgtatcaaatttacaaaaagggagattgttatgaaaaaaatattgggaatattaggattagttgcatgtttaactttggggacagttgggtgcaatagtaatgaagacaaaacagatgatggaaaacaagaaaaaacaactaaaagtagtgattcagtagagttaaatatatcggctgctgcaagtttaaaagaagcaatggcaaagattgaagaagaatataaaaaagttgattcaaatgtaaaacttacagttaactatggagcatcaggctcattacaacaacaaatagaacaaggagcaccttgtgatttatttatttcagcaggtcaaaaacaaatgaaagctttggatgaagagaagttattagtttctgatactatgaaagatttagtaaaaaatgatttagttcttatttcttctgctgacagtagtgtatcaggtatgaaagatttgactacagataaagtgaagaaaattgctgttggtgaagttgaaagtgttccagctggtaagtatgcagatgaggtgttaactaatttaaatttaaaagataagttaaaagataagctagtatttgcaaaagatgtaaaagaagttttagcatgggtgcaatcaggaaatgctgatgttggattcgtttacttcagtgatactgtcaataatgataagataaaagtagttgaaaaaacagacgaaaaaactcattcacctattacatatccagtttcagtaattaaagctagtaaaaacgtagatgctgctaagaaatttgaagaatttttattaagtgagtcaggacaaaagatttttgaagaatttggatataaaaaagtagaataaacttataaataaattatgtgtaattaagtataaattatatataaataaatgaaaattgaaaataattgtgtattataataaaatggaaatagtgaaattaatagagttattagtttcactatttccatttaaaattaaggagggaaagatgggaacagattggtcacccttatggatatcacttaagacatctattttgtcaacaataataacttttgtaataggaatatttgtgtcatatattatggctaactatagaggtaagtggaagggtcttatagatggactatttacacttccactaattttgccaccaacagttgtaggtttctttttattattactatgtgggaagaatggatttataggaaagtttttattaaatttcgataggactttaatatttagttggacagcaactgtaatttcagcagtagtggtgtcttttcctatgatgtatagaacttcaaggtcagcttttgaacagattgataataatatgctgtcagctgctagaacattaggtcttaatgaatggaaagtattttttaagattgcagttccattagcatggcctggaataattggtggattggtgctgtcgtttgccagagctcttggcgaatttggtgctacacttatgatagctggaaatatacctggaaaaactcaaactatgccaatagctatattttttgctgttgaaggcggagatatgaataaagctatgatgtgggttatgattattgtagcaatatctatagcaatgattttattactaaattattggtcggaatttcagcaaaaaattataggaaagaggtgtggatagttgagcttatacgtggatattgaaaaagatttatcctcttttaaactaaaggtagaaattaaacaagaaaaaggtactctggggtttttgggggaatctggttctggaaaaagtatgacattaaaatgtatagcagggcttgagaaaccaacaagaggtaaaattgtattaaatgatagagttctatttgattctgaaaagaagataaatttatcaacacaagatagaaaggtaggatttttatttcaaaactatgctttgtttccacatatgactgtaagtcaaaatatagaacttgggcttttaaaactaagtaagagtgaaaaaaaggaaatagtagcaaggtacttagatatacttaaattaaatgggtttgaagggagatatccttggcaattatctggtggtcaacaacaaagggtagcactagctagagcattggcaacatctccagatatattacttttagatgaacctttctcagcactggaccatcatttaagaagtaatatggaaaaagaacttatgaatatgttaaaagattacaagggagatatactatttgttactcatgatattgaagaagcttaccgagtttgtgatgatattatagtgtacaacaaaggagaaggtcttccaaagagacctaaaaaagagctctttgaatctccaaagtaccttatagaagctaagataacagggtgtaaaaatatatccaaattaaatagactggataaaaatactatttatgctacagactggggatgcgagttgacattaaatagagaaataggtgataatatagaatatgtgggaatcagggagcatcatattaaggtcttggattctaatgaagatttaaatgaaaagttatgtttcgaattgattaacattgtagaaaatccttttacatatactatatatgttagaaaaactgatttatctaacgaatgtgtacctattcaaatagaattggaaaaaagtaaaatgagatttaagaaaggtgacagaatatatttagattttccacaggaatatttattttgctttagatacaattataacaaaaaggagtaaactatatgactgaaaaagaaaaaatgttgtctggaaaaggatactatgcaaatgatgaattgttagtaaaagaaagagagtattgtaaaaaattaactagattgtttaataatactttagaggatgaatatgaaaaaagagaagatattttaagacaactatttggttcagttggcaagcaaataaatgtagaacaaaacattaggtgtgattatggatataacatacatgtaggcgaaaatttctttgcaaattatgattgtatttttttagatgtatgtaaaattgaaataggtgacaatgtaatgttagctccaaacgttcaaatctatacagcctatcatccaattgatgcacaacttagaaattcaggcatagagtatggttctcctgtaaaaataggtgataatgtatggataggtgggggagtaatcataacaccaggaattactataggtgataatgtagtaataggtgcaggaagtgtagtcacaaaagatataccaccaaatactgtagctgttggaaatccatgtagagtaataaagaaaatagaagaataaatatgattgtataaagtttatacaagtaaaatttatacaatcatattaagagcatttacatataatctttaaatagataatacattaaaataaaaatatatgcctgtttctataaattaatttatagaaacaggcatattaatcgtatatagaaaatatctttctattcttgtttagtctttacataagaaatattttcattagaaggtttttccatacctaaagcttttaatatatcttcattaacaatgatatctgtatcatctgatgtagccacaggcatatcagatactgattcgccatttaaaattttaactgccatttcacctgttttgtaacctagtttttcgtagttgataccttgacaagcaagagcacctttttcaactggcccagattcagctgctataacaggtattttattctcagtagctattttagagactataggcatagaagaagccactaagttatctgtaggaacatataatacgtctattttgccaactaaactagaaataccttggttaacttcatttgaagtagttatacctttttcaacaactttaaatccatttttagatgcatattcttttaaagcatcaacttgaactttggaatttacttcactagtattgtacataactcctatagtttttgccttaggagcaaatattttaagaagttctaaacctttgtctacagaaacaaaatctgatgttccagatacatttgtgcctggcttttcaagagttttaactaatccagcagcaacagggtcactcacagcagtaataagtataggtatatctttagtagcattaaatgctgcctgagctgatggagtagatatagcaaatattaagtccttcttatcagatgcaaatttactcgcaatactttgtgtagtaggcatgtcattttgagcattttggaagtctatatcaatattttctccatctttaaatccgttcttttctaatgcttttacaaaacctatcctagtggcatctaatgctggatgttcaaccagttgagttataccaatttttttaacttctttacctttagaattactttcttgttttgaattaccagagtctcctccttgtgaacaccctgtaagcatagatatactaagagcaccagctaaaatcaaacttgccaatctttttttattaatcatttttatatccccctcaaaaatttattattatatatgttcatatattcatatgaattattacaaagtaaccataattattgtaattttaactttattttaaagccgagtttaatacaatagatatattattttaaactgcatattcaaatttttctaagatttcttcaactgttaattgttctttttctttaccttttacatctaatacaacttcacccttatgaagcattatcaatctatcaccataatgaagagcgtgttttaagttgtgagtaaccataagtgtagttatatttttttcccttacaatcttattagtcaattcaattacttcatttgatgtttttgggtcaagtgctgctgtatgttcatcaagtaataaaactgatggacttgttaagcacgacataattagtgataatgattgtctttgacctcctgataaaaattttacttgaacatcaaggtatttttttaaatcaagagatacaccttccaataaattttctaagaaatctcttttgtaacgaagacattttcttagatttaatagttttcctttgttaagagctaaagacaagttttctctaacagtcatagaagggcaagttccaagacttgggtcttgaaaaactctacttactatttgagttcttctgtgttcagctaaattagacaagttatgtttatttaataatacttgaccagaagattcttttataagcccggatattatatttaataaagtagatttaccagttccattactacctatgatacttacaaattcaccatcttctatatcgattgataaattttcaaagatagtattaggttcaccatatggattagggaaactctttgaaagatttttaatttgtaacatctacaacacctcttttttctgatttatttttggtactagctttgcatttgttttttttagtgaaatatttaagttaccagtagctaggaaagctattataactatggcagttattagttttaagtcagttgataacattcctaaactcattgcaaagtatatagtgaattggtatataaaagagccaacaattattgcagtagtatctttgataaaagtaaatttcttaaatagtgtaataccaattatgatagaggcaattccaagaactaaagttcctatacccatatttacatctgagaatcccaagaactgagccataagactaccagataaagctataagtccgtttgaaatcataagtcctagtatttttatagaaccgatatttatacccagagatttaatcatttgagagttatcaccaacaccttttaaagtgtatccaagacctgtttttaggaataaatctaaaaggattttacagatgaatacaaaagctaaggctaaaactataggagatatttccccattgaataagtgtttaaagctaaatagaggaatatttgattttcccattattcttaaattgatagagtatagcattcccataactaaaataccagaaagtaagttagatatcttaaacttaatgtgaagaatccctgtaacaagaccagcagtacaaccacataagatagccattaaagttgctactacaggagaaataccattagtaagagaaaatgctacaatagaagcacccattgtatagctaccatcagcagacatgtctggaaaatctaggattttgtaagttatataaacccccagtgccataatcgataaaattaaactttgcgtcattacagatataatacctgacataaataaaacactcctttgaaaatatttttataattttaattatttgctaattttgtgtataaaaaaaccacatagtgtacaaaactatgtggtaaaaacacgaataagccacatagtttaatctatgtggctcttatatagttaaatgaaaactttataaacaatatagccaacatagatacaatcccaaaattttaatagtcttaaggggtctgtatctatgttaaaacgtaggtacaaaccctaaaaatagtggctataataataataatattttctattgtttaataaagtattcataattatctctcccttttaatattttaattagtcagaaaattatatgtattctcgacttgttataaattataaattatacaataataaaagtcaactgctaaatttaattaaaatactaaataatgtatactcagaatacttttaaattaatgtattgtttgcaaaaaacgttatcctaagttataagtgaatgtggaaattttatcaaaatatttactaaatatggaataactagacatgtatatcaatcaaatatcataaaaaaaagctgtctggagaatattaaaattcttttggacagctcaagtagtgattagaaagttatataactttcataatcagtcgtcaatatagacgacttttatggaaaatgaataactttatatgcaatattcaaattgctacaataagcacaattttcaaagggttagggtggataagagtacttattatataaagttttcatattacctacttcatattacctattttttgaaattaataagttttattttgcagattttgcattttcatctgactttatatactttatattatctgctgataacttttgcatgtcaagtgcttttagtgtatcttcgttaattattatttcagtttcatctaatgtagtaactggtatatcgccaacagattttccttctaatacttcaatagcaagttctccagccttataacctagtttttcataatctattccacaacaagctaaagcaccagaagatacagaaccttcttcagaggctattataggaatcttgttttcattagcaactttagaaactattggcatagaagaaactattaaattgtcagtagggacatataaaacatctattttgccaactaaactagaaatagcttggttaacttcacttgaagtgctgattcctttttcaactacttcataattatttttcttagcataatcatgtagagaatcaacctggatttttgaattaacttcactagtattgtatataacccctattttctttgcttttggagtcaatgttttaaccaattctaatgttttatcaattgaaagataatcagatgtaccagaaacatttccacctggtttttcaagagatttaacaagtccagcttctacagggtctgtaacagcagtcattattattggaatatctttagtagcattataagctgcttgtgcagatggagtagatatagcatatatcaaatcttttttgtcggatacaaacttactagcaatactttgtgtagtaggcatatcattttgtgcattttggaaatctatttttatattatctccatctttatagcctttatcttcgagtgctttgatgaatcctttctttgctttatccagagacggatgttccactaattgactaatacctatatttttttgttttttgctatctgtttttttattttcatttgaagcattggagccatcattttgagaacatccagtaagcattgatacaccaagtactcctgctataattaaacttaatatttttttactttttatcattttattttcctcccttaaaatttaataattatatttgttcatatattcatatgatagattataaatatttctgattaaaactaagattttaatttcttatactgcatattcaaatttttctaagatttcttcaactgttaaattttctttttctttatcttttacatctaatacaacttcacccttatgaagcattatcaacctatctccatattgaagagcgtgtttcaagttgtgagtaaccataagtgtagttatatttttttctcttacgattttatctgttaactctattacttcatttgatgtttttgggtcaagtgctgctgtatgttcgtctagtaataagaccttaggacttgctaagctagacataattagtgatagtgattgtctttgacctcctgaaagatattgtactttaatatctaaatatttttttaagtccaaagaaattccttcaagtaagtgttccaaattattcgttttatgacgaagacatttttttaagttcaataatttccctttattaagtgctagagataaattttctctaaccgtcatagaaggacaagttccaaggcttgggtcttgaaaaactctacttactatttgagttcttttatactcagctaaatttgttatagtagtactatctaaagtaatttgaccagaagattcttttataagcccagatattatatttaataaagtagatttaccagttccattactacctatgatacttacaaattcaccatcttctatatcgattgataaattttcaaagatagtattaggttcaccatatggattagggaaactctttgaaagatttttaatttgtaacatctacaacacctcttttttctgatttatttttggtactagctttgcatttgttttttttagtgaaatatttaagttaccagtagctaggaaagctattataactatggcagttattagttttaagtcagttgataacattcctaaactcattgcaaagtatatagtgaattggtatataaaagagccaacaattattgcagtagtatctttgataaaagtaaatttcttaaatagtgtaataccaattatgatagaggcaattccaagaactaaagttcctatacccatatttacatctgagaatcccaagaactgagccataagactaccagataaagctataagtccgtttgaaatcataagtcctagtatttttatagaaccgatatttatacccagagatttaatcatttgagagttatcaccaacaccttttaaagtgtatccaagacctgtttttaggaataaatctaaaaggattttacagatgaatacaaaagctaaggctaaaactataggagatatttccccattgaataagtgtttaaagctaaatagaggaatatttgattttcccattattcttaaattgatagagtatagcattcccataactaaaataccagaaagtaagttagatatcttaaacttaatgtgaagaatccctgtaacaagaccagcagtacaaccacataagatagccattaaagttgctactacaggagaaataccattagtaagagaaaatgctacaatagaagcacccattgtatagctaccatcagcagacatgtctggaaaatctaggattttgtaagttatataaactcccagtgccataatcgataaaattaaactttgcgtcattacagatataatacctgacataaataaaacacccctttgaaaatattttaaatggttttttaaatttggttttaaaaaatgattttgatataaaaaaaccacacagtatatataactgtatggcaaaaattcgaataagccacacagtataatccatgtggctctatattatgatgataaaataaaaactttaacaacaattactatagccaacatagatacaatccttaaaaatcataatcctaaggggcttgtatctatgttatgacaatttgtcttaacttaggtacaaaccctaactaaattggctactaaaaaatcgtacttgtttgtttaataaagtcttcatatttacctctccttttaatttaataattttgaaaattttgttttctgttttgtatagtaattagtttaatacagtaaaaaataaaagtcaactataaattttgaaaaattatcaagttatcagaaaattgagtttaaataaaaaaatttttacatgtagaatatagttatattcttaattattgtttttttataaaaatgaaaaatataaataagtcataaaagattataaaaataaagagatatttagataattagtgtaaataggttttaaatcaacataataacttaaattatatggtataataaattaaataattgttttaattcaaaattttttgttattttaaattatttcaaaactcttagttttagtgattttatttatgatatttatgggattaaaagatttcaatagatatttttggtaagtatttaagaagtctttaactttataggagtgataatttatgctaataggtacatctaaattaagcagaaatgttgatactgcatgtgtagaagaagtagggattccaatgattgtattgatggaaaatgcggttatatctgcaatgaaaaatatggatatagacatgtataatagttatacagttgtatgtggtgttggaaataatggaggagatggtcttggaatagcaagacatctaaatacatatggaaaagaagtaaacgtatttttagtaggtaatcttgaaaaactaagtgaatgctctaaaataaattacaatgtacttttaaatatgggaattaatattataaatattaataaaaatgatttaagtgaaaaaaattatggagatgaaaatgaagtagataaaattattaaagttgagaaacaaaatattataaaaaataaaaatttaacaatttttaaagatagagtatctaaaagtgatgttgtagtagatgctatatttgggactggattaaaacgtgatataactggtatttttaaagaagttattgacatagtaaacgataatagcaaaaatacatattctatagatattccttcaggtatagatagcgataatggaaatgtattaggaacttgtattagagcaaacaaaacgattagctttgagttttataaaagaggttttctaaactatgacactagcacacttataggtgatgtagttgtagaaaagataggtgttccagattttattacaagaaaataccatgatgaagagttcataactgataagacttttgtaaaaaataatattagaagaagagataagcatggttttaaaagtgattttggaaaagtatctatagttgcaggttcaaaaggattttatggtgcaagtttcatagcaactgaatctgctgttaagagtgggagtggacttgtaacattaattagtagtgaagatgtgcaagaaaaggtatctattagacttacagaagcaatgactttaaattttgaagaagaaagattaaataaattacttaattctagtgatgcaattggttttggtccaggtatgggagataatagtcaaacatttgataaattacttaagatagtagaaaattctaattgcccaatagtattagatgcagatggattgaacgttatgaaggacagatgttataagtttttagaatggaaaaatagatttgtaattacacctcatttgggagaaatggccaggttgacaggagattcaattgggtatataagagaacatagagtagatgttgcaaaagaatttgctcaaaaatataatctggtggtgcttttaaaaggttatcaaactgtcataacagatggtaaaaaaacatatataaatcctacaggaaatagctgtatggcaactggtggaatgggtgattgtttgcttggaatgattacttcatttataggtcaaggtatggatatattggaagctacagttagtggagcatatatacatggctatataggagataaattgagcaaagcaatgtatacggtaaatgctacggatttaataagtaacatttcattaacaatgaaagagttgttggatatataattgattaaaaaatagctacgcacacttgtgactttagtcatgagttagtagctaaaatagtcagcatatagggaaacctatatgtagagataggatagaacctatccaatactacttgaattgctaaaatcccctaaagctaactaaactaaaacataaggatgaaataaacctaagtgtgaaagttacgaaagtagaaaaaattggttagatggtataaggttaaatcctaagtactttaaaatgggcaatcagcaggtaagctccgaataggagaaacttcaacgactattcctcttgagggaagtacactacaagttatcggtagtggaagtggatagaccttagcggataatgccgaaggataagatatagtctgtgcttacatgaaagtgtaagaagttcataagagaactgcataggtagtagcgaacttatgtgaacgacaacctcaaaaatgataaaagttaagacttacggttcttaaatatgttatttaaaaataaatataaaaaaccttcaaaatacttgttttaagtaattgcatattttaatattatgataggtgatgaaaaatggaagttactcatggtagaggatatgcatataatatgtcaaatatagacatccagtattatggggagacatctttggaatcctagttatttcgttgccactgtatcagaaaatacagaggagcagataagaaaatatattaataatcagaaaaagcaagtaaagtgaggtggcagtagtggaaaaagcttataagtttagaatgtatccaaataaaaaacagcaagagttaattaacaaaacttttggatgttgtagatttgtatataataagtatcttgctaaaagaatagaagtttataaaaacgataaagaaacttttacttataaacagtgtagttctgatttgaccaatttaaaaaaagaattaaagtggcttaaagaacctgacaaattttcactacaaaacgccttaaaagatttagataatgcatataaaaaattttttaaagaaaaagcaggatttcctaaatttaaatcaaagaaaattaatagattttcatataaaactaattttacaaatggaaacattatgtattgtggtcaacatataaaactacctaaacttggtatggttaaggtaagggataaacaaatacctcaagggagaatacttaatgctactatatctaaagagccaagtggtagatattatgtatcattatgctgtactgatgtagatattgaagtatttgaaaatactaacaatcagataggtttagatttaggaattaaagaattttgtatctcaagttgtggagaatttatagaaaatcctaagtatcttaagaagtcattaaacaaacttgctaaattacaaagagaattatcgagaaaaacaatcggtagtttaaatagaaataaagcaagattaaaagttgcaagacttcaagaacatatagctaatcaaagaaatgattttctacaaaaactatctactaaattaataaaagagaacgatattatttgcatagaagatttacaagtaaagaatatgattagaaatcgtaaactatctcgcttaatttctgatgtgtcatggtcagaatttgttcgtcaattagaatacaaggctaattggcatggtagacaaattgtaaaggtaggtaaattctttgcaagttcacaaatatgcaataaatgtgggtataaaaacgaggaagtgaaggacttaaatataagagaatggatttgtcctagttgtaatgaaattcacgatagagatataaatgcaagtataaatatattaaaagaaggattaagactaataacgattcaaaataaataacttatgtaagaaccgtaggaactacggggatagcctgtggagaattagtaagacatatgttagtatgcaaaattctatgaagcaggaaccctgtgactttagtcatgggaggttcagactactttgtaacaattttaacaaagtatgttgatataatactattaaattaatcttagattagtttattctattgatttgtagtttaaatttatattcaaaaacattgtataaacatataatttatatagggttttataattcatatgaaaagagggtagatagtatgaagttaatatggttgatagtagcagtcttatttggaatagcagaaatgttaacaccaagcttaacattgatatggtttagtgtaggagctgtaatacttatatttttaagtagctttatagagagtattttcttacaaattttaatatttgcagtaatttctatagcaatgttagtcgtagctactaaaaaaatagtaaaaaaagataaaggctataaatctaacactaatttacaagcaatgatgtctaaaaaaggtattgttacagaagagatttctccaaataacacaggtctagttgtagttgaacatgaaacatggacggctatttctatagatggtgaaaagatagaaaaaggttctacagtagaagtattaaaaattgaaggggtaaaattagttgttaaaaaagtagacgccacagttaatgtgacaaaccaatagaataaaggaggatttatagtatgggtactaaaattgttttaagtattgtattaatagtagtagtcgtagcaataagtttaacgtgtataagagttataaaacaatctaaagtaggtataataatgagacttggtaagtttcaaaaagtggctgaaacaggtgtacatttcttaataccatttttagataaaatggcatatgtaattgaccttagagaaattgtaatagattttccacctcaaccagttataactaaagataatgtaactatgcagattgatacagttgtatattataaagttacagatccagttagatatgtgtttgagatagctaatccaatagctgctattgaaaatttaacagctacaacactaagaaatataattggtgaacttgatttagatgaaacattaacatcaagagatataataaatgtaaaaatgagaactatccttgatgaagcaacagataaatggggtataaaagtaaatagagtagagttaaaaaatataatgcctcctcaggatattcaagttgcgatggaaaaacaaatgagagcagaaagagaaagaagagaggcaatacttcaagcagaaggtaataagtcagctgcaatacttcaagcagaaggtgaaaaacaatctgcgatattaacagcagaagccaaaaaagaagctatggtacgtgtagcagaaggtgaaaaagaatctgctatattagtggcagaaggtgaagctgaagctataagacagaccgctattgctaaggcacaaggtgaggctgaaatgataaaaagaactcaaatggcaacagcagaaggtttaaaattagttttttcagcaatgaaagaggctgatatagacaataatattctagcattaaaatctatggaagctcttgaaaaaatggctgaaggtaagtcaacaaaactggttttaccttcagaagcagttaatttcctaggaacattcaaaggaataaaggaagttatgagtgatgataacaaagaagtacttgatataaaagaagttttaaatgataatgaatcattaaaaaaataaaagagttttgttatcataggaaggatatggaaattaaaggtcgaattaattaaatatagcacaaaaatgcacgttgaaaagaagaggacttataaatttttaagtcttcttctttgtttttattagaaagatgaaattataaaaatgaattaacagaatctttatacaatttatcctttactaatgtaaaaagtgttatataatattatataaaacatatagcaaataagcatggttttagttagtctatttatattattaatatatatttataaaaatataaacattaatactaagaaaactaataaataatttaaaagtttatatccttttgtttaaattatagacaaagaagtatcaattaaaaaataaagttgattaataattacttgattttctttggataattatttaacaaatattagattatattttgctattacgaatttaacaaattaaaaaataagcatgtttatatgacacaagggatttataaaaaatgtttttatatttataaaataaaatttgtattattttttaaccgataattgaatattaataaatactatagtgcttatggaaaataatgtatacgtcggtaagttcattatggggtatacattatatcaattgtatagttgatattattttatttttattaaggtattatttaagcaacatttatacacggcatttattgactgataaagtttataaaagtaaaaatgcaattataaatattaattactagatgaggggagtgtcattaaatgaaaaaagagatgttagctatgattttggcaggagggcaaggttcaagattaggtgtttttacaaaaagaattgccaaaccagctgtatcatttggaggtaagtatagaattatagattttgtgttaagtaattgttcaaactctggtattgatactgtaggtgttttaactcaatatagaccgttgatattaaattcacatataggcatgggaagtcattgggatttggacagaataaatggtggtgtctatgttttacaaccatttatgaatgaaaaagaaggaaattggtataatggtacagcacatgcgatatatcaaaatatggactttgtagatacctataatccagaatatgtattgatattatctggtgaccatatatacaagatggattatagcaaaatgttaaaatttcataaggaaaaacgctctaaagctacaatagcagtgattgaagttccttgggatgaagcttcaagatttgggataatgaatacaaatgaagattcaagtatctatgaatttgaagaaaaaccaagtgaacctaagagcaatttggcatctatgggagtatacatatttgattggaaaatgttgagaaattattttaaggaagcagaaaaaaatccagaaataaattatgatgattttggaaaaaatttaatacctaaaatgttagaagataatgttggaatgtatgcttatccatttaaaggatactggagagatgtaggaactatacaaagtctatgggatgctaatatggatataataaaatctccagaaacacttgatttagcagaccctaaatggaagatatatacaaatactatggcaatgcctccacaatatataggtaaaaatgcaaatgttcatagatcaatgatagctgatggttgtagaattttaggtgaagtaggcaactctgtattatcacatggagttgttgttggtaaaggaagtaaagtaattgattcagtaataatgccaaatgttgtaataggtgaaaatgtaactatagaaaaagctatgataggtgagtgtgcaactataaatgataatgttcagataaagaatgtaaataatgaaataaatgtagtttctgagtatgaaaatatcgaacctagatgcgtattaatagaaggaggtctttaagatgagaaatgaatgtttagggataataaatttaaacaaaaaaggagacccagcaataaacaaacttaactatggaagaccaatagcatctacaccaatagctggaagatatagaataatagactttgctttatctaatatgataaattcaggaatcactaaagttggaatattcgcaaaagaaaaatacagatcattgacagaccatataggtagtggtaaagattgggatttaagtagaaaaaaaggtggcctatcaatttttagtccagaaaacactaagtatagaaatacttactcacatagagaaggtgatatatatactatcttagctaatctagattatatagaaaagagtgaagaagaatatattttaatagctccaagctatatgctatgcaatttaaattattctcaagcattggaataccataaaaaatctcataatgatataactataatatataaaaatgtaaataatgcaaataaagattttgctggtaacttaacactaaatttagatagtaacaatagggtaataaatgtaggaaataatttaggcaaattccctagagcaaacatatgtatggagacatatattatgaagcgtgaagattttgttgaatgtatatataacattgtaaataaaggcagttattgttatttagaagaatttattattgaagaagcagaaaatatgaaaataggagcttatgaatatacaggatatctaaaatgtgtaaattctgttgaatcatattttgaaatgagcaaagatttattaaatttagaagttgcagatgaattattatactctgaaagaaagatatttacaaaagaaaagaatgaatcacctacaatttatacagatagtgctaaagtagaaaatagctttatagcatctggttgtttaatagaaggtactgtaaaagatagtatcatatttagaaaggtaaatgttgaaaaaggaacagttatagagaactcaatagtaatgcaaaattgtgtaataaagtcaaatgcaaaactatataatgcaatattagataaaaatacgagtgtatcaaatgggaaagaattaagaggagatgaaaaatatcctcttgtagtggaaaagaatacaaatatataaataaattttttagaagggggaatgactaatgaaggttttttatgtaacagcagagtgttggccctttgcaaaaactggaggattaggagatgtttcttatgcattgcctaaagaattaaaaaaagaaggtgtagatgtaagggtaataatgcccaaatattcaactataccaagttatttaaaagatcaactaaaagaaatagctgtgtttagtgtacgtgttggatggagaaatcaatactgtggtcttttagaaatggaattggatggtgtaaaattttactttatagataatgaattttattttagaagagaagatgaaagaaagagtatctatggatatggagatgatgcagaaagatatactttctttacagatgcagttttagaagctataagtagaattgatttttatccagatgtaatacatataaatgattggcatacagggatgttaccattaattctaaaagaaagatatgcaacccttgaggggtataaaaatataaaaactatgtatactatacataatctccaatatcaaggtgtatttgataagcatgttttatatgatatattggacttaccacaaaaatactttgataatagagatatagagtattatggctcaataaattttatgaaagctggtataaattttgcagataaaattataactgttagtcctacttatgcaaatgaaatacaaacatctttttatggtgaacaattagatggattacttagaaaagagtcaggaaaattaaaaggtatattaaatggtatagattatgatttaaacgaccctgcaaaagataaagatatatttgttcattatgatgtagactcaattgacaaaaaagtagaaaataaattgagattacaagatatattgggacttaaaaaagattcatctattccgttgataggtatagtttcgagattagtttctcaaaaaggatttgatttaatagcatacatgatgccagaacttatgagagaagatttacagattgtcgttttaggaactggagaacatcaatatcaatcaatgttcaactattacgattctaatttttcagataaagtatcagctagaattacttttaatgcatcattggctcaacagatatatgctgcaagtgatatgttcttaatgccatcattatttgagccttgtggtataggtcaaatgttagctatgagatatggttctttaccaatagttagagagactggagggcttagagatacagtaacaccttataataaatttactggagaaggcaatggatttagttttaaaaattacaatgctcatgagatgtttttctgtttgaaaaatgcaatcaaagtatttaaggacaaagaaaaatggattaaattagttgaaaatgcaatgaaaacagataatagttggaaaaaatcagctaaggagtatatagaaacatatagagacatatgtgattaaaggagtggtttttttggtaacaataagcaaaaagaaattcaagcaaaaatttgaagtaaaaatgtatagcttatatgcacaatctatcaaggaagctactgatgaacaattgttaaatgtattatgtagtctattgaaagatgagatagcaaaaaaatgggttgctacaaagttagataagaaaaaagaagtttattattttagtttagaatttttaatagggagacagttaaaatctaatttattaaatttaaatattgaagaagaagttagagaaggtttatctgaattaggaatcaacttggatgatttaattgaagctgaagtagacccagccttaggaaatggtggacttggtagattagcagcttgctttttagattctatggcatctttgaacataagtggtcaaggatatggaataaggtataaatatggtctgtttgaacaaaaatttgtaaatggttatcaggtagaagtgcctgataactggcttacagaaggacgatatgcatgggaaactgtaagaccaaatgaagcaacaatggtgaagtttggtggtgaggtagaattaatcaaggaaggtagtcatttaaaagtaattcataaaaactaccttcctgtaatggcaatgccttatgatataccaataatcggataccaaaaccaatgtataaatactttaagattgtttaagagtgaaataccaaagagagattttggtgaacttacctcaaatgctctaaattattctggtagctatgaagaggctttaaaacataagtattatactgaggaaatatcacaggtattatatcctgatgattcaaactatgcaggtaagttgttgaggttgaaacaagaatacttttttgtaagtgcagggatacaagatataataagaaaatataaaaagaacaaattaaatattgataatttattcgataaggtagcaattcatataaatgatacacatcctaccttatgcataccagaacttatgagaattttgcttgatgaagaaaatttatcttgggatgaagcatgggaaataactaaaaaaacagtgtcctatactaatcatactataatgtcagaagcaatggaaaaatggcctgtaagtatgatgaaagaactattaccaagaatttatatgataatagaagaaataaatagaagatatgtagaggaattaaataataaaggatatgagcaggatagaataaaaagaatgagtataatagactgtgacaatatcaatatggcaaacttatgtattgtcacaagtcatagtgtaaatggagttgctaagcttcatactcatattcttgaaacagaggtattaaaagatttctatcaagatgaaccaaataaatttaataataagactaatggaattgcacataggcgatggcttataagttcaaatcctcaacttagcaatttaattacagatttaattggtgattcatggaagaaggataccttacaattaaaaaatattgaaaaatttaaaaatgattcctctgttttacaaagacttgatgatataaaatacaataataaagcaaatctagcaaagtttataaaagataaatacgatttaaatgtagacccaagttcgatatttgatgttcaagttaagagattgcatgcgtataaaagacagttactgaatatatttaatgtacttcatatgtatcatgaattacttgataatcctaatttgaatcttgacccaagaacttttatatttggtgcaaaagcagcaccaggatattatttggctaaatgtataattaaatttataaattctgttgcaagtactataaataatgatgttagagtaaaggacaagttaaaagtagtatttttagagaattatggagtatcattagcagaaataataataccagcagcaaatgttagtgagcaaatttcaactacaactaaggaagcatctggaacaagtaatatgaagtttatgatgaatggtgctataactttggctacacttgacggcgcaaatgtagagatatgtgaacaggttggtaaagaaaatatgtttttatttggacttagtgcagaacaagtactaaattataataaatatggtggatattcttcacttgacttatatcattctaatatggatataaaaagggtggtagatgatttaataaatggatttattcctaatcttggcgaagaaggaagaagtatttataattcactcactacttacaatgatgagtattttgtattgagagattttgaaaattatggtcaagctcaagcagatataaacaggttatatagagataaagaaaaatggaataaaatgtctttagttaatatagctaactctggatttttttcttctgatagaacaatttctgagtatgcaaaagacatttggtttaaaagggtgtgattaaatgcaaagtgtaatagaatataactcttgggataaaaattttaaggctccgtttggagctttaaaatttgatgaggaattgaccatttgtgttaaagtaaatgagggatacaatatcaagtctatttccctagaaataaatagagaagaagaaatgagaacaataactttaaatgaagaattagataatgataaacttggaaagtgcttttgtggtaagattgaaaagtttgatggtacaggtgtttatttttattactttaaagttgatgttgaaatggatggtcagataaagactttattttatggaaaaaacagagataatggatattcttgtgaatataattatagtgatattaataaatatcaaatcactgtttacaaagattttaaagtaccaacatggtacaaagaaggaatactttatcatatatttgtagatagattcaataatggaaatcgtagtggtaaggttgataatcctaaaaaaaatagtttcatatatggaaattgggaagatatacctatgtacataaaggatagtcaaggggatgttataagatgggatttccatggtggaaatttaagagggataatcaataaacttggatatttaaaaaaattaggtgtaagtatactatatctaagccctatatttgaagcttctagtaatcataaatatgacacaggtgactataaaaaaattgacccaatgtttggggatgaagatacatttaaagaacttattgataaagcaaaagaaaaaggtatatcaatagtattagatggagtttttagtcatactggagcagatagtaaatattttaatatgtatggaaactataatagtttaggggcatatcaatctaaagaatctccatattattcatggtatatgtttgaagaatttcctcaaaagtataaaagttggtgggatgttaagacattgccaaatataaatgaattagaacatagctatatggattatataatatatgacaatgatagcgttataaataaatgggtaaatatgggtattaagggctggagactagatgttgcagacgaattaccaactaagtttataagagagttaaaaaaggaattaaaaaaggcagatgatgactcaattcttataggtgaagtatgggaagatgcatcaaataagattagctatggtcagagaagaagttatttattaggtgaagaattagattctgttatgggttatccttttagaaataacatgttttctttcttaaaaggagaaattaattcatatgaactttgtaatagatatatgcagattaaagaaaattatccaaaagaatcatttaggtctaatttaaatttaattggaacacatgatgttacaagagctaaaacggaattaaatgatgatgtagatttagtgaagcttgctgtagctatacagatgacatttgaaggagtaccatatatatattatggagatgaagcaggtctttgtggaggtgttgacccagataatagaagaacttatccatggaaaaatgaagacgaagatatgcttaatttttatagagatgttataaaaattagaaataagaataaacttttaagttctggaaatacagaatttatatatactaataatgattctgtattttcttttattagagttgatgaaaataatgatagaatgttaattttagtaaatagaagtgaaaatgtggaaagtatatcattatgtatagagagtagttttattgaggaaatacctataaagtatagtcttaaaaatgcaaatagtactatacaaattgaaaataatgagttgaaagtagatttagactctaaatcatttagaatttttagagtaaattaaatatctttttttagaaaaataaatagaaaataaggtgaatgtagaaagagttttgttttatcaaaactttttctactttttttgtataaattatcataagaattttagtgtttcaaaatattacaaagaagtataaaaaatatcataattgtgatattatataaattagtaagataaaactgaactctctaccaaagttgtagggagatttaacttttataatcttaatatggaggaacgtcttatgaaggtagatccacttacaactcaagtatatgactatatatcaaagaaaatccaaaatggagagtatgaagctaatcagagaattactgaatctgagatttgtaaatctatcggagttagtagaacaccagctagagaagcattaactaggttagcaggtgaaaatttactagaaaaaatacctaataagggatttgtagtaaaagaatttcaggaaaaggagaaattagacacctattccgtaattggagtattggatgcgttagccggttcttcagcattacaaaatttaactgaatcagacctagtaaaaatggaagaattaacagaaatgatggcggtctctataaagtataaaaattacaatagctatttaaaattaagtaatgaatttcacgatatatacataactaaatcagataatcaggtgttagtaaatctattgaactctttaagatataattttatgtcaaagtcatatactagtgataatgaagatgagttatataaaatgttgacatacagcaataatcaacatattgaagtagtaaaatttatgagggagaatgatttagaaaatgttgaaagagttttgagagaacattggaaaacgatacctatagcagagatgaaaaaagagaagcttttataaagtttctctttattttttttataattttgttattttactattaaatattaaaggaaaaacaagaataaatttaactttaaatacaaataaaaactctaaggcactacgatagaataatatatttaaattaacatatataaatcaatgaacttatagaattttaatatcataaatatagaatttattttatcaattaaaaaatttaataaattttatattaaaattaaaatacaaaaataggaaaattatttagtccaactaaaccaagaattttgatatatgaaataagaataatataaaagtttagtaataaaatacttataaattaaaaatagtaaactcaaaagcttactaaaactcaaaaaagtaaaaaaagcaaaataataaaaaataagaaagtttataaatactaagttttaaaaaaattaatataaacaacaaaaaaataaaaagtttataaatattgatatagctaatgtatatgtttttgagtaacttcaaaaaaacacttgtaaaaatgctggaatgttaatataataaatatcatgagtttaataaaagtaaaaataaaaaatagaaataataaataataaatattaaaaatatttgaatatagagaggagatgaatttgaaatcatggatagcgagtttgcaaatgcagttgaattaagctatgagtgtgctccattattagagtcgttaaaggaatactcagagaaagatatagcttgttttgatgttcctggacatgtaaaaaatagaggtgtagctatattaaataaatatctaggtgaaagtctcatgaaaatggatataaattcatcaccaactatggataatgtatctgcgccaaatgggattataaaaaatgcacaagatttgctagcacaagcatatatggctgatgaggcattctttataacgaatggcacaactcaagcaatacatgcaatgattttgagtgttataaaaccaggtgaaaaagtattacttccaagaaatatacataaatcagtaataaatgcgttaatactttgtggaggaataccaatatttatacaaccagaatttgatgaaaaactaggtataagtttaaatattactcttgaaaaagttagaacagagatagaaaaagattgtaatataaaagcattatttttccttaatccaacttactatggagtttgtgcagaccttgagagtattatagaactatgccataaaaataatgttttagtgttagttgatgaagctcatggtgcacattttccatttcatttagatttacctccttctgcaataagtttaggagctgacatggtagctgtaagtatacataaaactggaggagcattgacacaatcttcagcactcttattgaatagagataatgtaagttttgaaaaggttcttcaatcaatcaatatgctacaatcaacatcagcatcttatttgcttatggcaagtatagatggtgctagagttaatctagttgagaatggtgaaaagcaactgtcaaaagcattaaatctatctaggtatgcaaaatctaaattgaacaaaattgatggaataaaagttttatctacagaaatattgaaacaaaaaggtgttaaatttatagatgaaacaaaattgtgtataaatgtaaaagaattaaatttgactggatttgaagtatacgatttattatataaaaatttttcaattcaagtagaattgggagattcatataatatactggcacttgtgtccattggaacaaataaatcagatatagatagattagtaaaagcactttctataattgcaaagatttatagaaaagaatcaacattaaatgaatttaatatggttcaaataaatccaattattaaacttaatccaagagaagctttttatgcaccaaaggaaagtgtagaaatcaattcatgtatagatagaatttgtggagaatcaataatggcatatccaccaggtataccgattattgctccaggagaattgataacagaagaaattatggagtatattattttcttaaaaaatagcaatgcgtatcttacagatgtacaagataaaaacttagatagaatactagtaataaaataaattactttattttgcaagggcaagtgtttgttaagtagagtttatcaaatagaacttattaaaagtataaaggagttggggttgaaatgaaatttgaaacactaggaagacatatactagtagaatactataattgtgatgaaaacgtacttaaagacccacgtcttatagaaaattttatgaatgattcagcattaaatgcaaaagcgacaattgtggattctgtattccaccattttaatccttggggggtttcaggagctgttataattgctgaatctcatttgacaatacatacatggcctgaatatggttatgcagcagcagatttttttacttgtggtgatatagacccatggaaaagttttgaattattagagcaacttttaaagtctgaaagaagcgagtctacagaaattccaagaggcttaactacaaaaattaaaaaatattcaaaaaaagatttaggtaagattactcataaaccagaagcagtataaaacatacaagagaaagtgaggattattatatggaactttggtatacagaagaatggacagaaaatgtaagattttctataaaagtaaataaacatctatttgaaggaaagtctcaatttcaaaggatagatgtatttgatagtgatgaatttggaaaatttctaacaatagatggattaatgatggtaacatataaagatgaatttatataccatgagatgataactcatgttcctatggctacaaatttaaacataaagaaagtattagtcataggtggaggtgatggaggtacagtaagagaattaagccgttatcctcaaatagaaaagattgacatggttgaaatagataaaatggttgtagatgtatctaaggagtatatggatatatgctcatgtaaattagatgataaaagagtgagtttatattttgaagatggtgttaattttgttaagtgtgcacatgataaatcatatgacctgataatagtagattcaactgacccaataggaccaggcgaagggcttttctcaactgatttttataaggattgttatagaatactgactgatgatggaattttagtaaatcaaagtgaaagtccgtattttgactttaatgctaaagagatgaaaagagctaataaaaaattaaaacagatatttccaatatcagaagtttatcaagcacatataccaacatatccatctggtcactggttgtttggatttgcttcaaaaaaacttaatccagtaaaaaatcaagatagaaatggatgggagaaattaagtttaaaaactaaatattataatagtgatatacatttaggttcgtttatgttacctcaatacgtgaaggagatgctagatgaagaataatttctatcatatgaacacttttatgagtatggacaaaaattatgaagaatctaatcttatagtatttggtgttggatttgatggaactacttctaacagacctggggctagatttgcaagtagctctatgagaaaagaattttacggtcttgagacatatagtccttttttagatttggacttagaggattataatatatgtgattatggagatttagaaattagtgttggaagtacagaacaagtcttaaaagaaatctatcaagagacatataagattgttagagattcaaaggtaccctttatgattggaggagagcatttagttacattaccagcctttaaagcagtacatgaaaagtacaatgatatatatgtaattcattttgatgcccatactgatttgagggaagaatataataatagtaaaaattctcatgcaacagtaattaaaagaatatgggatattgtaggtgataataaaatatttcaatttggtataaggtctgggacaaaagaagaatttaaatttgctacagaagaaaaacacacatacatggaaataggaggaatagatacgtttgaaaatatagttaatatgctaaatggaaagaatatttatctaactatagatttagatgtattggatgcatctgtgtttccgggaacaggtacaccagaacctggtggtgtaaattatagagagtttcaagagatttttaagattataaaaaactctaatataaatatagttggttgtgatattgtagagttaagccctgattacgatacaacaggtgtatcgacagttatagcttgtaaaatcttaagagagttatgcttaataatatctgataaaattaaatagagtattttatataaatagtatatattataatataagaagttattttaaaaaagttagtttaagtttgacgcttttctaaagtaacttcttatttttgtaattaaaaataaatataataaacaacaaaaaagagccctcgatagctccttttctaaaatatatatatttaaattaaataattatattctatttacgttttcagcttgaggtcctctattaccttgagttatatcaaagctaaccttttcgccttcttctaaagttttgtatccatcattttgtatagctgagaaatgtacgaaaacatcatcttctccctctacagatatgaacccaaatcctttttcattgttaaaccattttactattccgtttttcattataagaaaacctccgcattattaaaaaatacaaactaaaaaaataagtctgttctattaatataacataaattttaaataaaagcaaataaaatttttaaaaaaattaattacttttagaatttaataaaaattgttaaattatacagtgagaagtattgtaaaatttgacgaaaatgtaaatgtagataataaatttaatgtcaaaaaatgcaacaaaaaggtatgtaagtaaaaagtaaaattaaaatatataataaaaaatattatatattagattaaaaagtaaaaataaaaatagtgaaatttcagaaatatcaataatattatataataaaataaaaaaacactatatatattcgataaaataaaatttaaacatataatattttatgtatatattaataaaaggacatattgtgttataatggtatcgtataaaatcatttacgggggtggtattaaaatgtttcaatttgaaacacaaatacacaaattaagacatgatgttttaactgcaatagctagacttggaaaagaagataaccttaccagagaagcaatggataatattcagtatgaaataataaaaggtgagaaacctacatacagatgttgtgtttataaagaaagagctataatatctgagagagtaaatgtaagtatggggttacaaccaggtcaagataagatagatttagatacaatggatatagaagaagatgaacaaattatatatattttggaagctgcatgtgacagttgtccaataaatgaatttacagtaacagatatttgtagaggatgtctagcacatagatgtaaagaagcttgtaaatttggagctataacacatgtcggaggaatggcctatataaatcatgaattatgtaaggcttgtggaatgtgtaaaaaagcttgtcaatatgatgccatctcagaggttgttagaccatgtaagagtgtttgtccaactaatgccttaggatttgatagagaaaatatgaaagctatgatacatgaggataaatgtttaaactgtggagcatgtatgtcagcatgtccatttggagcaatatctgataagagtttgatagctcctgtagctagaaagttggttcaaaaagagaaaatgtatgcggtagtagctccagctataacaggtcaagttgaagcaaatgttacatatggtcaaataaaaaatgctataaaatcactaggatttgttgatgtattagaagcagcttgtggagcagatgcagttacagttcatgaaagcttagaatttgctgaaagaatggaaaagggagaggcttttatgacaaattcttgttgtccaggatttgttggttatatagaaaaaacatacccaaatcatgtaggaaaaatatcttctacagtgtctcctatgatagctagtggtagatttataaaaagtcatgaaccagatgctaaagttgtattcataggaccatgtacagccaaaaagagtgaggcagctaagaaagaattaaaaggagctgttgattatgtacttacttttgaagaaataatggcattatttgaggcatttgatatagacttggctaagtgttcaaatgaagatatagatgatgcatcaatttttggaagaggttttggagctgctggtggtcttacaaaagctatagaaaattatcttgctgaaaaaggtattggtgttaattttgaacctgtaaagatttctggttcaagagaaatcaagaaaactatgactatggctaatttaggaaagctagaaggtaattttatagaaggaatgatgtgtgaaggtggttgtataaatggttctggtaaattcttatcaggtgcaaaggttaaagccacttttgatagaaaaaattctcaatcaactaagaaaagtgtcttagcaaatacaaagataaaagattttagtaatataaatttagaaaaataaagataatacaaagcaacaaaaatacatattgttaatagagttgttctaagttgaggtttaacttttggacaactctatttttatttatatatttaattaatgaacaactaaaataaaaattacatatataatattttgtatataacttaacaaagtatatgcctatgttataataatttatagaaataaataaaaaatacaatatacataatagtagaaatatagtaaaaaggtgtgatttatagggaggattacttatgtttgaatttgaaacgcaactaaaaaggttgaaacatgaagttttaacagcagtagcaagactatctattgaagaaaatttaacaaaagaaaatatagaaaaaattccatatgaaataattaaaggagaaaaggcgagatatagatgttgtgtttataaagagagagaagtagttcttgaaagggcgcaacttgcattaagtttaactccaaatagtaaatatggagatataaatccagattcagttagtttggacacagatgagcaaattatatatatagttgaagcagcatgtgatagatgtccaataaatgaatttacagttacagagctttgtagagggtgtttggctcatagatgtaaggaagcatgtaaatttggggcaatttcttatataaatgggagagcatatataaatcatgatttatgtaaggcttgtggaatgtgcaaaagttcatgtcaatatgatgctatatcagaagttgtaagaccttgtaaaagcgtttgtccaacaggagctttggattttaatagaaacactatgaaagcaatgatacatgaagataattgtataaattgtggagcatgtatatcagcatgtccttttggagcaatatctgataagagtttgatagcacctgttgcaaaaaaacttgcaaagaaagaaaatatgtatgcaatagtagctccagctataacaggtcaaatagatagtaatattacatatggtcagttaaaaaatgctataaaatcacttggatttgtagatatgatagaagcttcttgtggagcagatgcagttacagttcatgaaagcaatgagcttattgaaagaataaaatcaggagataattacatgacaaattcatgttgtccgggattttttaagtatatagagaagatgttcccagatgaaaaagatagaatatcatctacagtgtctcctatggtagcaacaggaagattagtaaaaaaaatagattctgatgctaaagttgtatttatagggccatgtacagctaaaaagagtgaggcaacagagaaaagtttaaaagattcagtagattatgtacttacttttgaagaactaatggcattatttgaagcatttaatatagatttatcaaaatgttcaaatgaagatataaatgatggttcgatttttggaaggggatttggagcgtctggtggacttgccaaatcagtacagaactatattgctgaaaagggacttagttttgagtttgaacctataaaagtatctggtccaagacaaattaaaaagacaatgacaatggctaaattgggaagattagaaggtaattttatagaaggaatgatgtgtgaagaaggttgtattaatggagcaggtaagtttttatcaggtgtaaaagctaaaaatacttttgatagaaaaaatggacaatctactaaaaagagtgttttatctaatgataagattaaagaatttgaagatgtaaatttagaaagataattgttttggtacagtcatttttttatcatgccacaaatatgcctaaaattttccctttttatatgtgtattttacagagttaaggttgctatactataaatatgtaataaataaaatttataggagcttttggatgaagaaaatagtattaaaagatatcctgtttttagttactacattatctataatagtaatattattgtttgtaacaaatataactactaatagtaagataaaatcaacaagtgaatcttatttaaaaagtgacaaaaatagtgtgaggcaaaatggtatccagaggagcacaaaaaatactgcatttaagactactatattaagtactggaaagtctgactgtatattaatcgagataggtgataaattcataatgattgatacaggagaagataaaaatggagaacaaatagttgataaattaaaagaaaaagaaataaatgcacttgactatttgattaaaaaatagctacgcacactcgtgcctttagtcatgagttagtagctaaaatagtcagcatatagggaaacctatatgtagagataggatagaacctatccaatactacttgaattgctggaaacccctaaagctaaccaaactaaaacataaggatgaaataaacctaagtgtgaaagttacgaaagtagaaaaaattggttagatggtataaggttaaaccctaagtactttaaaatgggcaatcagcaggtaaactccgaataggagaaacttcaacgactattcctcttgagggaagtacactacaagttatcggtagtggaagtgggtagaccttaacggataatgccgaaggataagatatagtctgtgcttgcatgaaagtgtaagaagttcataagagaactgcataggtagtagcgaacttatgtgaacgacaacctcaaaaatgataaaagttaagacttacggttcttaaatatgttatttaaaattaaatataaaaccttctaaataattgttttaaataattacatttgttaacattattataggtgattaataaattgttcaccacagcattatataatatattaaatgtgataaaatcattaaaaagtgtatcaaaaaacaattaaagtgaggtgatagtagtggaaaaagcttataagtttagaatatatccaaataaaaaacaacaagagttaattaacaaaacttttggatgttgtagatttgtatataataaatatcttgctaaaagaatagatgtttataaaagcgataaagaaacttttacttataaacagtgtagttctgatttgaccaatttaaaaaaagaattaaagtggcttaaggaacctgacaaattttcactacaaaacgccttaaaagatttagataatgcatataaaaaattttttaaagaaaaagcaggatttcctaaatttaaatcaaagaaaattaatagattttcatataaaactaattttacaaatggaaacattatgtattgtggtcaacatataaaactacctaaacttggtatggttaaggtaagggataaacaaatacctcaagggagaatacttaatgctactatatctaaagagccaagtggtagatattatgtatcattatgctgtactgatgtagatattgaagtatttgaaaatactaacaatcagataggtttagatttaggaattaaagaattttgtatctcaagttgtggagaatttatagaaaatcctaagtatcttaagaggtcattaaacaaacttgctaaattacaaagagaattatcgagaaagacaatcggtagtttaaataggaataaagcaagattaaaagttgcaggacttcaagaacatatagccaatcaaagaaatgattttctacaaaaactatctactaaattaataaaagagaatgatattatttgcatagaagatttacaagtaaagaatatgattaaaaatcgtaaactatctcgcttaatttctgatgtgtcatggtcagaatttgttcgtcaattagaatacaaggctaattggcatggtagacaaattgtaaaagtaggcaaattctttgcaagttcacaaatatgcaataaatgtgggtataaaaatgaggaagttaagaacttaaatataagagaatggatttgtcctagttgtaatgaaactcacgatagagatataaatgcaagtataaatatattaaaagaaggattaagactaataacaattcaaaataaataacgtatgtaagaaccgtaggaactacggggatagcctgtggagaattagtaagacatatgttagtatgcaaaattctatgaagcaggaaccctgtgactttagtcataggaggttcagtttaacccatttagataaggaccatataggtggagtagatagtgtgttatctagtgttaaagtaaagaatattatacaagcaaattataagaaagatagtaagcaatatgatgaatatattgactcacttaaaaaagctgatatagaaccagtgctactaaaagataatatgaatattgtaatcaatagtgcagaaataaacatacatccggcttcaaaaagcaagtacgagagttcaaatgattattcaataatcactaatataagctatggagcacataagtttttatttgcaggagatgcagaggaagaaagattgtcagagtttataaatggaaatactttaaaatatgattttgttaaaatgcctcatcatggaagatatgacaaattaactgaaacatttttagagtctacttcaccccaatatgctgttattacatgttcagagaaaaaagaaccagaggaaggtgttttaaaaatattggaaagattgaatataaaaacatttttgacttctagtggagaggtagttatcaatagtgatggtaagacattgagtgtgaatcaataattttttttaaaatatctaaaaaaaatttaaaaaaatcattagcaaatattaccccttaaacatagtatattttaggagctgaaactccacatacaaaatgactaggaggtaacatattatgttggatagattttttggtgaaggcggatttggtggatgtgcttggtggataataatattattcttcttattcttagcattccaagattgttgggctgaaatggacttatgtgcatggatacctttcttaatattattattaatactttgtgaatgtggtgacgtttttgatggaggatgtggatgctaaaaaaatcaatttagatgatttaataaagcttatggtgggtataaataaaataccaaaccaatcacaatctagtgtttgaaggtagtcggaaatcccccgctaccttcttttttttattgttagaatttatttttgaattatttcatttacatataataatttttacaataaagtctgatataattaaaaagaaaataaaatttatttataggagatgtaaaaatggctatagtggataagattttcaatgagataaaacttatggttgcaagacttttattgggaaaaaaatacagtgaatatgaagaaaaagatttagtgtataatacagaagaagaagttatacttataactttaaaaagattagtttttcagggaaatgtaaacgaagcagaagaaattttatttgataaagctaagactgtaactagtgaaaatatgcagtatatagcaatagaattttatactatgcttatggaaaagactgatgaagaattagaagctatgaatttttctaaacaagaagtttatcaaggtatagaagatattagaaaagtattgaatttagaataaaagatatatgaaaatattgaaataaattaatgttaaggtgagaatattatacttatatataaaaatataatattcttattttattagttatattaggtatatcttatttaccataaaactatcttgaaaaaaattaatcttaattgtataatattactttgagtgaaaaagtattaacatttttttataagatgttttactaaaaaaatatatataaatatactgttatcaacaagaaatttaatttagtgaggtgttaagatgaaagtaggatttgaccacaaaaaatatttagaagagcagtctaaatacatcttagaaagagtaaataattttgacaaactttatttagagtttggaggaaaattgatgggagaccttcatgcaaaaagagtacttccaggatttgatgaaaatgcaaagataaaagtattacaacatatgaaagaaaaagttgaagttgtaatttgtgtctatgcaggagatatagaaagaaacaaaataagaggagactttggtatcacttatgatatggaagttttaagattaatagatgatttaagaggttatgaactagatgtaaatagtgtagtaattactagatttgaaggacaacctgctacaactgtatttataaataaattagaacgtagaggaattaaagtttataagcattatccaacaaagggatatccgtcagatgttgagactatagttagtgatgagggatatggagcaaatgaatatatagaaactacaaagccaatagtagtagtcacagcaccaggacctaatagtggaaaacttggtacttgtctaagtcagttgtatcatgaaaataaaagaggtaatgtagttggatattctaagtttgagacattcccagtttggaatgtacctgtaaaacatcctttgaatatagcttatgaagcagctacagttgatttaaaagatgtgaatatgatagattcattccaccttgaaacgtatggtgaaatgtcagtaaactacaatagagatttggaattatttccagtgcttaaaaaaataatagaaaagataactggaaaagaatcaattttccaatctccaactgatatgggtgttaatagagttggctttggaataatagatgatgaagtaataagaaaagcttctatagaagaaataataagaagatactttaaaactgcctgtgagtataaaaagggacaagttgataaaggcgcttatgatagaatgaaaatgattatggaagagcttaacttaaagccagaagatagaaatgttgtattacctgctagaaattacagtaataaattaaaagaaagtgccgacaagaatgatacttgtcctgtagttgcattagaattagaagatggtacaatattaactggtaagggttctgatttaatgaatggaacagcagcagtagtattaaatgccattaaacatttagccaatatatctgatgatatgcacttaatatcacctgtaatattagaacctatcataaacttaaaaacaaagactttagctagtagaaatgtttcacttagttgccaagaggtgttaactgcacttagtatttgtgctgtaactaatccaactgcacagtttgctatggaaaagttagcattattaaaagggtgtcaagctcattctactactatattaaatagagatgatgaacaaacatttagaaagcttggtatagatgtaacttgtgacccagaatatccttcacaaaatctttactatagttaaaattatataaaaaaatatgggctgttttaaagtaatagtttgagcagtccattacaattataataaaatcagtaggctgtcttgtataagacagtcttttgtttttaaaacatcccataaattaaatatatatactgttatccataaggaattttaaatttagttccttggaatacctattgtaaagcttttatatagtttttgcaagtgtttttaaggattttttataaattatattgaagttaatggattatagatggttttatttatggaaaatatgaatatataaagaaaataatgaaaaaataccaaaaagaaacataagtttggtataattaaaaagtaatataaataaaattaatctatttatactttaaaaggtgataataatgaaacattatagaaaaataattcatatagatatggacgctttttatgcatctatagaacaaagagataataaaaaattaaaaggaaaacctgttattgtcggtggaaatccacaaagccgaggtgtggttgcaacgtgttcttatgaagctagaaaatttggtatccattcagctatgccatcagctgtagcttacaataggtgtccatatgcagtttttgtaagacctagatttgatgtttataagagtgtgtcagagcaaataagagatatattttatagatacacggatttagttgaaccattatctttagatgaagcttacttagatgtaacaaaaaataaaaaaaatattgattcatcaattgagatagcaaagcaaataaaaaaagatatatttagagaagttggtcttacttcttcagctggtgtgtcatacaataagtttcttgctaagattgcatcagacttaagaaagccaaatgggttaactgtaataaccgaagaaaatgcccaggactttttagataaattacctgtgaataaattttttggtgttggaaaagttacttcaaatactcttaaaaatttaggtataaaaactggatatgatttaaggtgtttaaatttatttgaacttgaaaatatattcaaaaaaagaggttatgaattatataaatttgctagaggaatagacgatagaccagtggaaccaaatagggttagaaaatctgttggggctgagactacattaagtcataatttggatattgatgaagaagaaacacgcaacattcttgatgaactttgtgaagaagtatgtcatagattaaaaagctctgagaagtttggaaaaacattaacattaaaaattaaatatgaggactttacaaagataactagaagccttagtttagaacactatattgacgaatataatgatataagaagtggtgtagataatttgttgagaaatgttgaggttaatggaaaacaaattaggctattgggagttacaatatcaaacttaagtgataaaaaagaaacttataaagatattacattatttgaatacatggatagtattcaaatgtgagttttgtttaaatgaaataacactagctttaatactatataattgaggctagtgttattttatgaatatttttatactttttgttttttgacattatatactatatataaatactttatatttgtagcaatattcagacaaatagtgacctaaaaatcgtactttgtttacataaataaaatagtatgatataattataaaaacaacttataatattggagaaggttgcttgttcgaaaaaggggatgataaattatgatagagataagaaatgtaacaaaaaaaataggaaataatgttatattagatgatatttctctagttgtagaaacaggtacattggtagttttgattggttcaagtggttgtggaaagactactactttgaagcttataaacaaattaataaaacctacatctggtgagatatatattaatggcaaaccaatttctcaggaaaatgaaatagagcttagaagaaaaataggatatgttatacagaacacaggcctattccctcatcttacaataaaagaaaatatagagctaattccacgcctaaaaaaggaaaaatccgttgaagaaattgaaaaaagaacgttgcaactacttgagatggtaggacttgatagtgatgaatttttgaataagtatccttcagaacttagtggtggacagcaacaaagaattggtgttgcaagagccattgctactgatgctgaaataatattgatggatgagccttttagtgctttagacccaataacgagaacatctttacaagaacaattattttctcttcaagatgaattgaaaaaaactataatatttgtaacgcatgatatggatgaggctttaaagatagctgataaaatttgtattatgaaggatggaagaatagcacaatatgatactcccgaaaatatacttagaaagcctgcaaatgactttgtaaaagattttatcggagaagatagagtttgggataatccagaatatataaaagcaagagatattatgataaaaaatcctattgctgttaattccactagaactgtaactcaaggaatagaaattatgagaacgagtaaggttgatagcttactaattatagatagagcaaaaacattaaaaggtattgttactgtaaaagatatgaaagatattgatgataagtcaatattacttgctgatattatgtcgagtgagcctttgcatgtaaatgaaggtgataatttagtagaaatactaaatgtaatgaatcgtaattcggttggatatattccggttatttctgatgaaaataaactggtagggcttattactagaagtagtttactttctgttttaagtgaacaattcttagaaatggaggtgagtgttcttggctaatttttttaactttatactattacaaaaagataagattatagagcttttaatacaacatatgagtctaactgttacatctattttaatagctataatagttggtgttcctcttggaataattatttcaagaatctcatctcttagaaagtttgtacttggatttgtaaacttagtccaagcagttccgtctatggcacttttgggtcttcttgtacctatacttggcataggaagtaaaccagccatatttatggtagtggtttattcattactaccaattgtaaaaaatacgtatataggtataacaagtattgacccagtagtattagaatcagctaaaggtattggtcttacaagaaatcagacattatttaaaatacaattccctttagcacttcctataataatgggtggagttagaatatctgcagttacagctgttggtttgatgactcttgcagcatttataggtgctggtggtttaggatatttagtattttcaggggttcaaactgtaaataataatatgattttagcaggggcaatcccatcatgtataattgcactgttagttgattatttatttagtaaaattgaagttgcagttactccaaaaggattaaatccaaaagcacctaagaaaaattatatagcacttaaagtaatatctgtagtggttgttgtttcaatgttgttcgttgtttttagttctagtttttcaagtaaaaaagatacaataactattggttctaaagattatacagaacaacttatacttggtaatgtttatgctgaattagtagaaaaaaatacgaatcttaaagttaagaagaatttaaatctaggtggttcatctgttgcgtttaatgcaattaaatctggtgagttagacatgtatgttgactatacaggtacacttttggtaaatgtaatgaaacatgctccgattaaagatgctgatgaagcatataatgttgtaaaagatactatggaaaaagaaaatcagttaactttacttgaccctcttggatttaataatacttacacattagctatgatgcctgaaactgctgaaaagtatggaataaatactatttctgatttgactaaatatggtaaagaatttacattctcaccaactttggagtttgaaaatagagaagatggtcttgtagggctttctagagattatggtttaaaattcaaagatgtaaaagcaatgaatggaagtttaagatatacagctttagataataatgaatctcaggttatagatgcatttttaactgatggtcttattaaaaagtttaatcttaagatattagaggacgataaaaatttctttgtaccatattatgcagcaccattagtaagagaagatactttgaagaaatatcctgagttagaaaaagttatgaatatgctttcaggaaaaataaatgaagaaactatgagagaacttaactatcaagtggatgaacttggtaaatcaccagaagaagttgctcattcattcttagttaaagaaggcttagtataaaaaattaatagtttatatcaaaaatttaagggagtgtctcaaaatgaactttttagttcatgaggcactcttttttatatgaaatcaaatatattttatcatttcaacaataaaaaagaagcttatctttattttgagacagtctcttatttttatgtataccaaaaccatacctacgatttttatttataattaagtttcaaatagaatgaacaagtacaaccaattttgaatataaatatagtaaatgtgcttatatacgattttattatctgggtgattgatattgatagatagctttctttattgaatcgaagggagggggaatttgttatggataactataagaaagtgaagcaagtattgtggataattttatttgctaattttgcagtagcattattaaaaatcattattggtaatcaaataaaaagctatagtatgacagcagacggatttcattctttgtcagatggagcatctaatatagtggggcttataggtattttctttgcatctaaaccaaaagataaaaatcatccttatggacataaaaagtttgaaattataaccagtttatttataagtggtatgttgtttgttatagcaattaagataattcttagtgcagtgctaagaatagctaatccagttgtacctgctataactatagaaagtttaattgctttaattattacactttttataaatatttttgtatgcatgtatgaatatagaattgggactaaactaaatagttatgttttaatttcggattcattgcatacaagaagtgatatatttgtgtctctaggtgtattggttactttagttggtgttaagttaggatttccagtaataatagaatctatagttcctattattatttctgcattcataatttattcggcttatggaatatttaggccatctattggaattttggtcgatagagtggctgtagatgaggattatataaaagaaattgtgtttgaatttaatgaggtaagggatgttcacaatatcagaagtagaggtagcaaaagttctatttatattgacatgcatgtaatggtagacccatttataagcgtagagcaatctcatgatttaacacataaaattgagaaacaaatacaagaagaaattaatgaaaatgctcaagtaatagtccatattgaacctttttatagtttttaacttagctataaaatacaagttataaaaaaatataatttataaaaaaaatattataccataaataatttataaaaattatttatggtataatattttctataaagaaattaagtcttaatatatctaaggaggaatttacaatgagatacgttgaatatggaaagacagggaaaatggtttcagtagttggctatggaggattaaggtttgatttagaaaaaagtaatcaagaaaatgctgatttagtcaaatatgcgtatgaaaaaggtattaattactttgatacagcgccagggtattgtgatgacagaagtgaagatatatttggactagcctttagacaaatgataaaggaaggtaagaccgatttttatgtatcaactaaagaaaagccaaaagcatgtgatacatcagaaaaagctatagaggctgtaaaaaaatcaatagaacgattaggcgtatctaaaataaatttttatcatgtttggaatattagaaagatggaacattacgaactagcaatgagacctggaggtcaatatgaaggattattgaaatgtaaagaagaaggattgatagaccatatagtattttcatctcatcaaccaggagatgaggttatagatattctaagtgaaaataagtttgaaggtgtaactatgggaataaatatattaaactttccatataggctaaaaggtgccaaatatgctgttgataatggatatggtgttgtggcaatgaatccattaagtggtggaactattccaaagtataataaagaactttcttttctatcaaaagatggcgaaagtactatagaatcagctttaagattcaacataggaatttcacaaataagtatatctttgatagggtttaataaaaaacaagatatagatgatgcatgtaaaattgcagacgaaaatagaatttattcagatgaggatatacatgatattgagactagattaaataagaatatgaacgaaatatgtacaggttgtggttattgtaaagtatgtccaaaaggtattaataccccagcctatatgcttttttataatgaaaagcagatgtttaaaaagagtgatgaagaaatgacaaagttagtttatggtttaggacattggaattacacaatgaatagtaaggcaaaagctaaagaatgtatatcttgtggaaaatgtgaagttgaatgtactcagcatttacctataatagatagattaaaagaaattaaaaaatgggaagaagatggagctaatagtgttaaagtctaattaattttatactatatttgaaatttgtatagtatttagtaatgttttaaaatatagttttaatatttaaggagacagattataattttgtctccttaaattatgctttaatttgttatagtttaattccataagcaacattgtatatttttatataaagtttttcaaatattttacattaatattgcttacaaattctcattttatacaacactaatctatgttatataaacaatacttgactgattataacatcaataaagtaaatattgtggttgtaaataaagagttattcaattacaataaaacaagtaagaacattatgaagatggctattaaatataaggaataaattgtaggtgtcagcaaatcctatataatgaatggatggtgatatattgatgagtaaaatattaaaatataaaaacgagatgtttttgtttatattagttgtaataacttacttaataataactaagatatttttttctaagactactatattttataatttaaacaatacttatgatgtattgttagatacagatacaggggttttattcaatttaaatgtatttgctataagtcaagacaatagtaagcacatattgttttcagcaattatatcaatttttgcatatccaatatacctattttgtacttcaatagcaaatcctgggacaacagattttaatagtgcctatgggtttggactaatttgtctacaaataataactagtgctatgtcaataactttagtctttaatcatattaaaaagataaaaatgcagagattaactttaattttacttactatgataatgatattttcttttccacagttatttatgactttaaatgtagagagatttatatatagccaattttcattaatatttttcatagttattgcaaataagatgaaaggaaaaaattcttatttagtagaattagcagctattcctctatttggaataactattagtaatatatatttgtatttttttaatatgatatttgagtttaaattaaaaataggaaaaatgttaaaacatttaattacatttatcctaatggcatatatttgtgtagtttcaacgaagtcttatgagagttttatgaaccttggaaatgtaatacagtatgatacgaaatttataagtggagaaccaattttggaaaagattgcaatgattatagagagattattgtattcggttttttattttcctggagcaagtattaaaaaagggttatttttgcaaaatggagaagttgctacaataccagtaattcttacattattagctttatgtttttgtgttttatcagttattgaaaattcagaaaaaagagttcctaagctatgtatgggaataattatattcaatctaactttacatggtatagtaggatataatctagtcaattcaagtattatggctataaattttagttttgcagttataattttattggcttactttacgaaagcgcttagaaaaaatgaaaagaatatgtataatatatttctatcgctgttattggttactatagtaatcagtaatgtcaatggatttatagaaattttaaacatagggataaaatcatatcctgtttaaaaaataatattgaaagggtagtaagtttatgaaacagaccaatacaagtataaggcttcttactaaaatttcagattatataaagttaatgagaataaagcaatatataaagaatttctttgtattttcagctataattttttcaaacaacatactaaatataaatttatttttaaatacgtttattgcgtttgtgtgtttttgcctaatgtcatcatcagtatatgcactgaatgatgctatagacatggataaagataaaaaacatcctaaaaaatgtaatagaccagtggcaagtggaagaataagcaaaaaaagtgctaatatactatttgtagtattagctttaatttcagtctgtttatcaacagttgttagttttaatctttctataattcttagtctctatttgataaacaatatattatattctcttaaactaaagaatataatactattagatgtgttttcaatatctcttggttttatacttagggtttatgcaggatgtgtagccataagtgttagtttatcaaattggataattttatgtacatttttcttatctctgtacttagctcttggaaaacgtaaaaaagaaatagaaactctaagagatgatgcagttgaacatagaaaaatattggaagattatgacatagaaaatctaaatcaaatgatgatagttatattaagttctacaattgtatgttattcattgtattctacaagtaatccagaaaagccacatatgatatttacaacaatatttgtagtttatggtgtacttagatataattatataattaacactacaaatgaaaataatcctactgatattgtcctaaaagataatgctttaaaaataaacgtaatcttatggataattacatgtttaataatattgattttttagtgatatttttagtgataggatggggaaatacttatgaaaaaaagtgtattattacttgatgtagattatactgttataaatactgatagcatgatagatttttttatttactctttaaaaaataaaacctttaaaactattataaagttgccatacattatttttattctatttatgtatttaattagaatgatacccttgaagaaggcaaaagaggcaatcttttatccaatagtagattttagtgaagaagatttaaaaaagttttttgatgattgcataatgaaaaaaattaacgaatctatgaaaaaggtcatttacaaaaataaagaagaagataatgttataattatgataactgcatctccatatgcatatatgaaatattttaagtattatggtcttgcagacaaggttataggcacggagtttttttatgaaaattcaagatataaaaatcaattcattggagaaaactgtaagggaattgaaaaagtaaaaagaataaaggctgtattaggtaaacttgggatagagattgattatgaaaattcatatgcatattcagactctaagagtgatttaccaatgctttcattgactaaaaatgcatttttagttagtaaaaaggatggtgaggttatagagcaaataaattcataacttaatgtcacttagaataggagggaatagtttgggatatttacacatattaattttatctatggttcctgtaacagaattgaggggagccattcctataggtattgcaatgggcttaaatcctatatgggtttatgtatttagtgtaataggttctacattggtatcgattcccttgatattgacattcagacatgtattacaatttttaagagggaagaaactatttaaagggattgctgatgtaattgatagaaaaataaactcaagaatgaagaaattaaaaagtgtttcgataattggtataatactatttgtaggtataccactgccaactacaggaacatggactgcatctgctatagcttccatattaaaaatgagaataaaagatgcttttatgggagtatttcttggcaatttgttatcaggggttatagtttcagctctttctttacatataatataaaactatctaagtaatatacttggatagtttttttatgagtacatgtgaaaaatttttaataataaataaaaaatgagataaagtatttaaattcagttagttctaaaatgtttactatggcaaaagaaatatagtatagtattacttgtagggaaagtactctaaatttgtctgctgataaaatgaaatttttatatagaataaaattttagtgatacattttaattattggattgaggaggttttaaaatggaaaattcaaacactaacttaggcagtgaaagtgtgggtaaattattatttaaacttgctacacctgctattattgcacaaattgtaaatgttttatacaacatagtcgataggatttttattggtagaatggaaaatggagaagttgctatggctggtgttggagtggcctttccaataataattataataactgcatgtagttatttaatcggtatgggaggaggtccattagctgctataaaaatgggtgagcaaaacaatgatgaggcagagaaaataatgagtaacagtttttctgtactggtgattttagcaatacttttgactataggttttaagattggaaaagagcctttactttggatgtttggagcaagtgaatctacaattagatattcaatggactatttaaatatttatttaataggtacagtgtttgttcagatttcaatgggtatgaatacttttataaatacccaagggtttgctacaactggaatgatgacagttgctataggtgctttaataaacataatacttgacccgatttttatatttggctttaatatgggtgtaaaaggagctgcattagctactataattgcacaaggcgtttctgctatttgggtacttatgtttctctttggaaagaaaagtatacttaaaataaaaaagaagtatatgataccaaaagcaagtatcatcttaccagtgcttggcttgggaatctctccatttataatgcaatctacagaaagtttagtacttatagccttaaatagtaaattacaaatgtatggaggagatttagcagtaggttcaatggccataatgagcagtataatgcaaattcttatgcttcctaatatgggggttacacaaggagcacaaccaataataagttataattatggttcaggtcaacttgatagagtaaaaaagacatttaagttgtgtttattgtcatgttttacatattctactattttatggcttttattaatgatatttcctgcattttttgttagtatatttaataagaatccgcagttacttagtatgactagttggagtataaaaatatattttgctggtgcttttatgtttgggattcaaatagcttgtcaacagacatttttagcacttggaaaagcaacaatatctttggttttagctctacttagaaagattgtacttttaatacctttaatatttatactcccaacattctttaatgaaaaactttttgcagtaattttagcagagccagttgcagatataacagctgctactataacagcaatttctttctttatattttataaatgttttctatcaaaacctaaagcaataaaagaataagatatacaatataaattttttatgaaaatattttattagataaaaattagaatttgtattttaatttaataagatattttctataatgtataaatatatgaagttgaatttattttaaaaattatagtaagaaaaatgtaagtatttgcaatattaatggtataatatttacagatatgataatcaataagaggaaaggatgtttataatggaaaatgatttaacaatgcaagaattacttgaccagcaagaacaagtattcagcaaagtgaaagttggagaattgacaactggaaaaataactgcagtgagaaatgatgaagtacaattaggattagactatgggtttgatggaataatacctataagtgaattgaacatagaaaaaaatcaatatatagaagatatataccacataggtgatgaaataactgctgtaataacaaaagtatctcaaaaagatggtacaataactttatctaaattacaacttgacaaaagaaatgattttgccgagttacaaaaggcttatgatgaacatagaataataactgtaaatgttgaaaagaatatagataaaggtgtatttgctaattacaatacatatacattttttataccaatttctcaacttgatacaaaatttattacagatacatctaaatttgttggtcttaacttagaagtttatataaaagaattggatgttagaaaaaatagacttgtagcatctcatagagatgtattacaagagcgtataaataaagagagagaagaaagaagagctcaaattaaggcagaaaaagaagctgaaagagcaagaattaagcaagaaagagaagaagaaaaagctcgtatcaaagcagctaaagaagacttatttaattctcttgaagttggacaaaaaagagatggtaaggtgacaaagataatgccttatggtgcatttgtggatattggtgggattgaaggattagcacatataaataatttagcttggacaagagttgaaagtgttgaagatgttgtttcagagggacaagaagtagaagtttatgtgttggatgtaaataaagagactaaaaaaattgccttggcattaaaagacataaataatgacccttgggatttaatagcaaaagaagtacaaattgatgatgttgtcaatgctaaagttcttagaataatagaaaaaggggcttttgttcaaattaaagaaggtgtagatgcgtatttaccaatatctgaattgagtgatactagagtggctaaagttactaatgttgttaatattggagatgaggttaaagttaagattcttgattttaaaccaaagactaaaagaatgttggtttcaataaaagaagcaactagagagccagaagaggatataacagaatacctagaagtagaggaatctttaggaagtattggagaattatttaaagataaatttaaagatttagaagtgtaaaataattgaaaatggggctgttttaaaacgttacactgtctattatgacagctttagttttgaaatagccctttagctattttcacgaatttatgtaaaatattaggaggaaatttaatgaaaaagtctattatggatgtacattgtcacactctaataagtggacatgcacatagtactttcaaggaaaatgtcgaagaggcgagtaagaagaatataaaatacttaggaatatcagaccacggacctaatatgccaggaggaccacatccattctatttttataatttgcatttgcttccacgtgaagtgcaaggtgtaaagattcttaggggaatagaaggaaatataatggattatagtggtaatttagatgttcaagaagatatgttgcaacatttggattatataatcgcaagtttgcatagaccttgtatagcttctggtacaaaagaagaaaatacaaatgctattttaaaagttatggataaacctaaggtaaaaataattggacatccagatgacagtaggtatcctttagattatgaacctatagtaaaaaaagctaaagataaaaatatccttttagaaataaataattcatcattaagttcaaactctcatagaacgggtacttgggaaaatgtaagtcatatgttgacattgtgtaaaacatatggtacaagagtaattcttggtactgactctcatatatgttattctataggagaatttgaaaatgcagaaaaagttttagaagcagtagattttccagatgaattagtcataaattatcatgaagatgaaattatagaattttttgatataaatttttagaatcttgggagtgaaaaaatttgagtaaaaataagtttatctatatgaattattatgacaatggttattttaaaaaaggaatgactatatatatggttttagcacttataattttagctacaatttttatatattcaacgacaatattatatattttatgtataataacagcagtttttctatttaaacaaggtcgtgatttttcaaataaatatgagggaaaagtatatattactctcgataatcattcaatattaataaataatcaatgtatattcagtataaaatctaaacaaagtcaaaagtttaattataagataatagaaaaaatagaagtagtaaaaaatatattaaatatatacactgacgaatctaattataaaattagattaagggcattgagtttggaagatgaaaaaaaattattgaatatcatagatgaaaagatgaaaaagtttaaggcataatatcatactgttttcaatagttagcatgttttatagaattgcttatcaaaaataaaaaattgagataattattttttttgttgacaatacattttaatgtgtatataataactattaaatcaaaatatttagaaaatttaaatgattaaaaaagtgatgaatagaagtagtaagaacaatgaaactttcagagagctaaaggatggtgtgatttagtagttgatagttctgaacttgtctaggagctgttttctaagatttaaatcttagaataatcggagtaattccacgttataggaaatatagtcattataattattgtattggctattactaagggagctttttagaaagctaaatagagtggtaccgcgagcaaaacctcgtctctaattttattagagatgaggttttttttattctaatgataaaattgacatttatccttatgaagtgtgcaggattgcgtcgatataaggtatactgaatacaaaaaacagaaaaagggggaaataacatgaagtgtggaaagtataaaaaatatgataaaatgcaaatagtaaatcgtaaatggccagataatgaaatatttaaggctccaatttggtgtagtgtcgatttaagagacggaaatcagtcactgccaacgcctatgagtgtaaatgaaaaagtcagaatgttcaaaatgcttattgatacaggatttaaagaaatagaggtaggatttccatcagcatcaaatacagagtatacatttttaagaaaattaatagatgagaatatgattccagatgatgtaactatacaagtacttacacaatctagggctcatcttatagaaaaaacatttgaatcaataaagggatgtaaaaaagcaattatacatttatataactctacatctgttcttcaaagagatgtggtttttaatatgagtaaacaagaaataatagatatagcagttgaaggagcaaaattatttaatgaagaagtaaaaaaatatccagaaacagaatttacttttgaatattcaccagagagttttacaggaacagagatggattatgcacttgaaatatgtgaggcagtgatagatgtttggaaaccaactcctcaaaaaaaagtaataataaatcttccatcaacagtggaaatggcaacaccaaacgtatatgcagaccaaatagaatggttttgtaaaaatataagttgtagggattctattatactaagtttgcatactcacaatgatagaggaacttgtacggctgcaagtgaacttggattattggctggtgccgatagacttgaaggaacactatttggaaatggtgaaagaactggaaatatggatatagtaaatgtgggacttaatctttatacacaaggaatagacccagagctagattttagcaatatagataagataattggtatatatgaagactgtacaaaacttatggtacatgatagacatccatatgcaggtaatcttgtacattgtgctttttcaggttcacatcaagatgctattagaaaaggcatgatagcaatgaaaaacagagataatgattactgggaagttccatatttaccaatagaccctcatgatattggaagagaatacaaagaaattataaggataaatagccaatctggaaaaggaggagctgtttatataatggaaacagattatggatttatgatacctaagaatatgcattctgattttggaaatgtagtcaaaatggaatctgatagaattggggaagaacttagtagtgaagcaatatttaatttatttaagaaagaatatattgaagttgagagcccttataaagttaagaagtataaaataaaatcaatggatgaattaaactatgaaaatgatgattctaatgatactaacatgattgagatgactgcaagaataagttatatgggaaatgaacaaaggattgttggtataggaaatggacctgtagattcatttaataatgcactaaagcaatgtggcatgaaagattataaatttagatattactgggaacatgcattagaggaagggtcacattcaagaggggtagcttatgtaggaatagagcacaataatgaagtctattttggtgtaagtatatcggaaaacataaatacagcagctattaatgcacttatgaatgcaataaataaaagttatattgaggaggaaataaaaaatggggatgactatgacgcagaaaatattagccaaacatgctaaattaaatgaagttaagaaagggcaattaatcgaagcagatttagatgtagttttaggtaatgatataacatcaccagtagccattagagaatttgaaaaattaggaattgaagatgtttatgataagactaaagtagtgatggttttagaccactttacacctaataaagatataaagagtgcagaacaatgtaaatttacaagaagtttcgcaaaatcaaaaggagttgtaaatttttttgatgtaggagatatgggaatagagcatgttcttcttcctgaaaaaggtatagtaactgctggagatgtaattataggtgctgactctcatacttgcacatatggagcattaggagcattttctactggtgtaggttcaactgatatgggagcaggtatggctacaggaaaatgttggtttaaggttcctggagcaataaaatttgttttgaagaataaaccaaataaatggataagtggtaaagatataatacttcatataataggggagataggtgttgatggagcactttacaagtcgatggaattttgtggagatggagtagaatacttatctatggatgatagatttactatttgtaatatggcaatagaagcaggagcaaaaaatggaatctttccagtagacgataagactatggaatatataaattcacataagtgttcaactataacaaaagatgtaaatatatatgaagcagatgaagatgcagtctatgatgaagtatacgaaatagatttagccgaactaaaagaaacagtagcctttcctcatcttcctgaaaatactagaacagtagatgagatagataaggatataaagatagaccaagttgtaataggttcttgtacaaatggaagaatatcagaccttgaagtagtagctgagataatgaaaggcaaaaaagtagcagatggagttagagttatgatatttcctggaactcaaaaagtatatcttgaagctatagaaaaagggtatattaccacttttatagaggcaggagcagcagtttctacaccaacttgtggtccatgtctagggggacatatgggtatacttgcagcaggagaaaaatccatttcaacaacaaataggaatttcgtaggaagaatggggcatgttgattcagaggtgtatcttgcaagcccagctgtagcagcagcatcagctataactggaaaaatatcaaaaccatcagaaataatttaagggaggtaaaatttatgattgccaatggaagtgtttttaaattcggtgacaatatagatacagatgtaataataccagctagatatttaaatatagctgattataaagaactagcaacgcattgtatggaggatattgatgataaatttatttctaaggtaaaaaaaggagatattatagttgcaactaaaaactttggttgtggttcatcaagagaacatgcaccaattgtaataaaagaaagtggagtatcctgtgtgattgcttctacttttgctagaatattttttagaaactctataaatatagggcttcctatacttgaatgtgaagaagctgccaataacatagatgaaggggataatatagaagtagatttttctacaggtgtgataaaaaatataacaaaagaaaaagaatataaagcagaaccatttcctgagtttatgcaaaatattatattaaatgaaggcttaattaactcaataaaagcaaatagggggtagtggagtatgaattgtaatatagcagtcataaaaggtgatggtgttggaccggaaattatagatgaaggtataaaggttctaaataaaatttgttgtaaatttaatcatagattcgattgtgaatatgtattagctggaggatgcgcgattgatgaaattggagaacctctacctaataaaactgttgaaacttgtcgaaaaaacgaagctgtattgcttggtgctgttggaggaccaaagtgggataaatgtaagggagataaaagaccagagtctggtcttttaaaattaagagagtcattgggtttatttgcaaatttaagaccagctacaatgtatgaaagtataaaagaagcttcaccacttagaacggatatagttgagaaaggcattgattttgttgttgtaagagaattaacagggggcatttattttggagaacgtggaagaaaaatcattgatggtatcgaaaatgcttatgatgtagaaatatataacgaaaatgaaataagaagaattggtaagagagcttttgaaatagccagaaatagaaataaaaaacttataagtgtagataaggcaaatgtgcttgagagttcaagactttggagaagtataatggaagacttagctaaagagtttgaggatgtagaactgtcacatatgtatgttgataatgctgctatgcaagttgtaaaagaccctagccaatttgatgtaatagtgactaataatatatttggagatataatatctgatgaagcatctatgattacgggttctataggtatgttaccatcagcatcacttagagaagatagttttggtatgtatgaaccaatacatggaagtgcgcctgatatagctggaaaagatattgtaaatccaattgcaactattctatctgtaagcatgatgttaagacatagttttaacttagaagaagaagctaagtgtattgaagatgctgtacaaagtgtactcaataaaggttatagaactattgatatctataatggtgtgggaaatgttgtaggaacaagagcaatgggcgaattaatagtaaatgaaatttagaattatagtttaatttgaataatataatttaaatatataacttgtagaattagtaaaaatctattgtagtataatttgttttatgaggggtgtctcaaaataaactttattagttaatgagacactcttttttatattaagtcaaatatatttttactattttaatagcgaaaaagaggcttatatctactttgagtttctattttgataaagttattttttggaaaataatactttaaattaaacttatcatattgaagtagcctatttttattattagaagtttgcagggattttattaatattatataatatattttagaattatttaatattaagcgactactaatgtcggttaggagatggattttttggcaaagtataaagttttgaagaagcaaaatagtagtaaatcttgtttagtttgtggaacacaaaatgagctaggacttaaagcagatttttatgaacttgaaaatggagagcttgtatcaatttgtaatacaaaggattggcatcaaagttatcctgggagagttcatggaggtatgtctgctgcaatattagatgagactattggaagagctgtaagtataaatgatgaccaaatatggggagtaacagtatctttagagttgaaatataagaaaccagtaccaacagatgctactataaaagttgttggaagaataactaaagaaaacagaaaattatttgaaggtacaggagaaataattctaccaaatggagatatagcagtgacagcaactggaaagtatatgaaaatgcctattggacaaattgcagaaggtgatttttctaatgaagaatggttttttgaagaatcgaaagaaaaagtggaatatattgaactttgattaaataaaaattttatattttaaaacataaattttatatttagaaaaaataaaattcaaaaatacaataaaaatacaagataaaaataaattagttatactaaaaagatttatcgtaatagcgtcaaatttacatactaaaaaaattaatttatatagataaaaagtatattttttttgagagaataattcagaaaattcagacttatgaaaaggcagaaaatgaatgttttcataaaatatataaaataaattatatataaaaaataaattttatgttgacatagttaattcagcttgatattatagttattaaaaataaggacagtaaaaacgctatccatattacaaactaaaaaggggggaattataatgagtaagaaattatttattcctggtcctattgatgttaaagaagaagtcttgcaaaagatggctacaccaatgataggacatagaggaaaagatgcatctatgctccaaaagagtataagtgaaaagatgcaaaaactattctatacaaacaacacgatacttttatccacgtcatccggaactggtttaatggaaggctccattcgttcctgtacatccaaaaaggcagcagtattttcctgtggatcctttggtgatagatggtacaaaatggcagtggctaataatgtcccagcggatatatttaaagttgaattaggagaggcaacaacgccagaaatggttgataaggtgctttctaccggagaatacgatttaataactgtaactcacaatgaaacttcaactggaataagaaatccaatagaagaaattggagaagttgttaaaaagtatgaagatgtaatctactgtgtagatactgtaagttcagccggtggaataaaagtcgaggttgataagattggaatagatatttgtataacatcagtacaaaaagcactgggattaccaccaggaatgtctatttgcacattttctcaaaaagcaatcgatagagctaagcaagtaccttttagaggagtatatcttgatttgttagcaatgtatgaatacttaatcaagaaaaactaccaatacccttcaacaccatctctttctcacatgttcgctttagatttccaattagataatatattagatgaaggcctagataacagattcaacagacatgaagacatggcaaacttagttagaaactgggctaaaaaacacttccaaatttttaccaatgaaaatcacttatccaatacacttactgttatagaaaatactcaaggtattagtgtatcaaatttaaattcaaaattacaagaacgaggattccaaatagcaaatggctatggagatttaaaagaaaaaacttttagaatttcacatatgggtgactatactgtcgaagatgtacaagaattattagataatattgatgatatattaggttttaataaataatattgtaaaaatatgtatgttttaagataaatttagaatatataataaataatattttataaaaattacatattaaatttttaacaaacaataggaaaatttgatatgactttaataaaaaaatattttgaaaattatataaacagaaagttaaattaagtaaagttttttattgatgaaaatactttaaaaaataaaaattggaaaaattaagtgaataaaaattggaggagtttgttatgtataatatattagttactgatggaatagagaaagaagcagcgagaaaattgagagagttagattttaatgtgatagagcagttttatgaaaaagatgttttaggagataaacttaaagatgttgatgtacttgtagtacgttcagctactaaagttactaaagatgtaatagataaagcattagagggtaaaaagttgaagttgatagtaagaggtggagtaggtctggataatatagatgttaaatatgctcaagctaatggcataaaagttatgaatactccaaatgcaagcagtatatctgttgcagagcttacaataggtcaattatttgttcttgcaagattcataaatactgcaaatgtaactatgagagatggaaaatgggagaagaagaagtataaaggtacagaaattaatggaaagacacttggacttataggttttggaagaattgcaaaagaagttgcaaagagagcagaattattaggtatgaatgttatatatactgacataatgggtgaggcgcaaggttttaacaattataaattctgtgatatggaagaagttttagaaaatgcagatttcttatctttacacataccatttgataagaataagggggcagtaataactgaaaaagaaataaataagatgaagaaaggggcttatttaataaactgtgcaagaggcggtttagttgatgaaaaagatttactaaaagcattagatgaaggtaaattatcagcagctgctatagatgtttatgaacaagaacctacattaaatttagacttagtaaatcatccaagagtttctcctacacctcatattggggcatctacagtagaagctcaagaaagaataggagacgaaatagtaaatgtgattcaagatttctttcttgacttcaacaatctaataggggtagcattataaaatattttgtataattaggaggaaattagtaatggcaacgattaaaccatttaaggcgattagaccaaataaatatatagtagataaagtagcagcacttccttacgatgttatgaatagtaaagaagctagaagaattgcagaagggaatccatattcatttttgcatatagataaatcagaaattgatttagatgaaaatatagatttatatgatgaaaaagtttatttaaaagcgcgagaaaatttatatgagtttcgaaaacaagaaattctagtaaaagatgacaaagagtgtatatatatatataaacaaatcatggatggtagagctcaagttggtatagtagcatgtatatcagttgatgaaagcttgaatggaacaataaaaaaacatgagtacactcgaccagaaaaggaaattgatagaactaaacacataaaatactgtgatgctaatacgggaactatacttgtaacttacaaacatcaaagggtgatagatgatataatcaatgattttatggataataatgaacctttatatgatttcataacagatgacaagatagagcatacagtatggaagattgatagtgatgatataatagataacctagtagataaatttgaaaaattagattatctatacattgcagatggtcatcataggacagcttcagcagaaaatgtagccaaagaaatgagagctaaaaatccaaattatactggcaaagaagaatttaattacttcatagcaatgattgcaccagatgagaatttaatggttttggattataatagggttatcaaagacttaaatggtttaagcgaggaagaatttataaataaaataaaagaaaattttgaactagaagaaatagaaggaaaagaaaaatataaacctgacaaaaaaggaactttcggaatgtacctaggtgataagtggtataaaatgaaagcaaataaaaatttattagaaatagaagaccctgttgactcattagacatttctatattacaagactatgttattgatgctattttaggaattgacaatcctagagtagataaaagaattgattttatcggtggaattagaggtcttgaagaattagaaaaaagagttaatgaagatatgaaagtagcatttgcaatgtatcctactagtattgaagatttaataagagtagcagatgcaaataagataatgccagctaagtcaacatggtttgaacctaaagtaagatgtgggctattcttacatgaaataaatgaataattaataaagggctaaaaagtgtacaattcactttttagcccttgtttttttgattgaaaatcgtatgtggaatataaattctataagttgatattcttaataatagttacctttttttagaaatggataattttaggatatagatagtcatattctatgctataattgaggatgaaaattcatataattgtatttgtatatttataaggttttaaatatgtatttataatagtattgttatatattttattataattataaaaaagttaataaaaaaagtgattttgaaatttatattttatttttataaatataattattatatttataaaaataaaatagtaaaaggatattataatattttactagaattattatctggtaacttaagttttgagtattaatctaaaatatatgtttttatagggtttaaattttatgtatacaaaattaatttgctaactgaatcatataaaaaaaacaaaatattttttagagggaatgattagatactattttctttgttatgaaattaattgaagagtaattaattagaaaaggaataaataataatgaatatattacattattactttttgataaatcaaaaataaagttatagtttttaatattaattaagaatgatgaaatatgaataaagattttacaaataaatcttaagctatcttatttaattctaatgcaggaagaaggtaaatgtatattgaaaaaatcatagaaatagaagtaaacaacttaaacaaatacaaaggtttgcaaaagaagtaatataattatatacaatgaggatgtgagtatgatgaacagactaaagccaagaattttaggtattagtatcttgtttattattataattattttaacatgtggagctgttttcaagtttaaatttaaattagataataaattaaaagaaaccacacatacatatttgtctgagtttacagaacacaatataattaatctcaagacaagacttagtggtcaatttgacatgcttgaatctattgctaacttcataggaaacttgaataatataaataatgaaatggtgattgctttaatggattctgatgtaaagcgaagttctttaattagaatgactatctctacattagatggggaatgttattctaatgatggaatcacccataatgttcaagatagagattattttaaaaaagctaaaaatggagaaaagaatatttcagagcctttaaaatctattgttaataataaagaaataatagttttatctaccccagtttataaaagtgggaaaatagttggtgttttaagtggaatttatgattcaaaaaagttaaatgagttattaggattatctgcatttgatgaaaaagcagatgtttttgttgcaaagaaaaatggagatatagttgctcaaaaaacaaataaaaatagaaagacgatatcatgtatatttcagctttttgacaaagataattgtgatgaagatgattgtctaaaaactataaaagaaaatatgaaaaatgataagtctggatattttaattataacttagataatgaaaaatttatgttaaactatcagccacttggagttaatgattggtatgttttttctgttgtgccaaataaaatagtgtctattcagtcagagaatatatcttatgatgtatatatttttgcattagaaatactactagttatattgatttttataatatatatagcatgtattataaataataacaccaaaattattataaatgaaaaagaaaaatttaaagtactcactgataatatattaggaggggttaaaacctgtttaaaagatgaatatatgactatgacatatgtaagtcaggggtttttagagcttacaggttactcttgtgaagatttaaataaaatatttaaaaatagatttaaagacatgatttataaagatgatttagacaagtttaattgtattattctaaatcaattagaaaaacaagataaaattgaagttgaatatagaattgtaagaaaagatggaagtataatttggattttggagagaagtaagtctataaatgataataaaggaagtgagtgtattcagggagttttaactgatataacagaacttaagaaaatacaagaagagttagattcaaaaagatttgaaatacaggctatcaatgatagtattgttggtggaatagtgataactgagataaatgatgattttgatagtatatatttaaatgaaggttatttaaatatgattggatatacacgcaaacaactggaagatgagctaaataataaattaatcaaacttatttttaaagatgatagaacagaattaattaatagtataaacaaacaactcaaattaagtgatacatttgcatctgaacaaagagttgaaaaaagggatggtactattatatggattttattaaaaggaagaaagataatttatgataatggaaaatctgtactttgttgtgttattgtagatatcacttctgctaaattattagagcaagaacttaaaaagagtgaagaacgtcatgaaatcattctaaagcagacgcaaaatatcataatagaatgggatatagaaaaagataaaatgaatatatcacctaattggtataataagtttaaatatgaccctataactgaaaacgcaacaaaaaatataattaaatcagtagatatatatcatgatgatatggataagtttatttcattaattaaacttacttcacaaggtagtgagtatgaagagtgtgaaattagacttagaactagagatactatttacgcttggtttagtataaaggcaacaactttatttgataataatggtaaaccttataaagtagtaggaagtttgactgatattgatgaatcaaaacgagaagctgaaaagttgaaagaaagggcagaaaaagaccctcttacagatttgtataataaaaaagcatcacaatcacttatagaagagtacataacattggataaaaaaagaaaaggtgctttaatgattattgatattgataactttaaaggaataaatgataatttaggacatttatatggggatgctgtattaagtgaaattgcaaatgacctaataaatctatttagagcaaccgatatagtaggcagaattggtggagatgagtttattgtatttataaaagatatttctgaaacaagagatattataaataaagcagaagaattggtaaaaacatttgaaaggtcttttttaggtaaaggacgaaattataaaatatcattaagtgtaggaattgctaagtttccacaagatggtatggactatatgacactatttagaaatgcggatatggctctttactcagccaaagggaagggtaagaattgttatacattgtatgataaaaaaattgataaagtccaatatataactaatacaagaaatgcaggagatagtgataatgtagagatgtcttttaaagaacatatcacaaattatatatttgatatactatatgaatcaagtgatatagaagtggcagtaaatttaattctaagtattgtaggtaaacactttaatgtgagtcgcatgtatatatttgaaaattcagatgataatcgagtatgtaaaaatacatttgaatggtgtaacgaaggtgtaacctcggaaattaataatcttaaaaatatttgttacaaggatttaggcaactatcttttaaattttaatgcagatgggttattttattgtaatgatattgaaaatttaggtagtgatgtgaaaaaagtacttaagccacaaggcatacgttcaatattacaatgtaaaattttagagggcaatgaatttagagggttcataggatttgatgaatgttcatataatcgtatgtggactaatgatgaagtgaacactttgacatttatatctaaaacgctcagtatgtttttattaaaaatgcgtattcagagtaagctagaagagtctttaacaattcaaaaatctgtgatggataatatggatatatgggcatatgttgttgacaggaatacctatgaattattatttatcaataaaaaaatgcttgagtcagcatcaaacactcatgtaggtgatttatgttataaagcgatatggaataatcaagataaaccttgtaaaaaatgccctatgatatatttaaaagatggtgatgatacttataaatcatttatgcgcaataaaaagtttgaggtacaggcaaatataactacaactactttgaaatggtttgatgggaaagatgcatgtttaatatttggaagtgaagtaactagtattgaagctgaagaaaatacttaaaatactgtgttatatatatacttaaaatcgcaatttgaatttattagacttaaaatgtctatataaatcatttaagttgtggttttaagtattttttatgatataattaagcgttaagaacaaaattaaaagatacttttgtataaaaaaatatttgttaaatatatattgagcaggtgataatatggaaaataagtttttaccaataagcaaacaagatatgatagatagaggatgggaagaattagattttgttctagttacaggagatgcttatgtggaccatcatagttttggaacagcaataatatctagagttttagaaaatgctgggtataaagttggaataatagctcaaccagactggagaactacagatgattttatgaagctaggaaaaccgagacttgcatttctagttaatgcaggaaatatggattcaatggtcaatcattattctgtaagtaaaaagcatagagaaaaggatatgtattctccaggtgggaaaatgggttatagaccagatagagctactatagtatattgcaataaaataagagaagcatacagtgatgttgcaatagtaataggtggaattgaagcgagtttaagaagatttgcacactatgattattggagtgataaggttagaaagtctatgttaatagatagtggagcagatttattagtttatggtatgagtgaaaagcagattgtagaagtagccaatgcacttaatgatggatatgacccaaaatatattagacatattgatgggacatgctatatttcagatacattggaagaaatatatgataaatatatattaattccatcatataaagaaatttgtgaagataaaatgaagtatgtagaagcttttaaaattcaatatgatgagcaagacccatttagaggtaatataattgttcaacctcatggaagtaagtatctggttcaaaataagccagaaaaaccacttagtagagaagaactagatgaagtatatggattaccatatcagaagacataccatcctgtgtatgaaaaatttggaggaataccagctatagaagaagtaaaatttagtatagtaagttcaagaggctgttttggtagttgttcattttgtgcaataacatttcatcaaggtagagcagtgcaaagtagaagtgaaaaatcaattattgatgaagcaataggaataacaaatttagatgattttaaagggtatatacatgatgttggaggtccaacagctaattttagaagaccagcatgtaaaaaacaaattactaaaggtgcttgtaaaaatagacaatgcttatctccatcaccatgtaaaaatttagatgcagaccacagtgaatacttacatttacttagagctgtaagaaaattacctaaaataaaaaaggtgtttgtgcgttctggaattagatacgattatgtaatggcagataagaacaataaatttcttagagagttgatagagcatcatgtaagtggtcagttaaaggtagccccagaacatatatcagaagaagttttaaagtatatgcaaaaaccagcaggaaaaacttatgataaatttagacagaagttttttgctataaatgaagaattaggtaaaaagcaatatttgataccctatttaatgtctagtcaccctggttctaccttaaatagcgctatagagttagcagagtatttaagagatactcactaccaaccagagcaggttcaggatttttatccaactccagggactctatctacaaccatgttttatacaggtattgacccgcttacaatgaagccagtttatgttcctaaatcaaaacgtgacaaggcaatgcaaagggctttattacaatatagagcacctagaaattatgatttggtatactctgcgttagttgaagcaggaagagaagacttaattggttttggacatagatgtcttataaagccaaaaaatgaaaagccttattttaatagaaataattctaaaaaaaatgtatctaaaggaacaaataaaaacaaaaaaactaatacaaataacagaagtaataaaaatcaacaaaaaagttcaactaaaaaaaagaaaaaacattaaagtataaataaaaatacttaaaaaagaaggattattcgataaattaacagaaattagtataaataaatataattattttaatgacgttacctttgggaggaagagatgaaaaagtatatttctataatattattagtggtggtgactatggttgttttggtaggatgttcaccaggaaaagataaccctaaaaataaggagctatcagttgtcaaacaagtaaaagtagctgttccagatggactaccagcagtggcaatagctaaacttgcaaatgaaaatccagagattaaagaaggatatgaaacagtgtatagcattgaaaagacacctgaggcgatttccactagagtgatgaaaaaagatgcagatatagctatagttccttcaaacatggctgcaatagcgtataataaaacttcatcatataatattgttggaactgtaggaatgggttcactttatttggtgtcaacagaaaatataaaagattattctgatttagttggtaaagaagttggatgtactggaaaaggacttactccagacataactataaaaagtcttttgttacaaaaggatataaattattcaaatataaaatttaattatgtaaattcagcaagtgaactggtaccattattggctactggtaaagttaagacaggtattgttccagaacctgcacttagtgctttgatgtctaaaaatccagacataaaaattataaaaagtttaaatgactcatggaaggaagtaagtggttcaaaagacggttatcctcaatctactttaattgtaaagtctgaatttttaagagataataaagattttgttgattcttttgtaggtcaattatcaaatagtatagattgggcaaacaaaaatcctgaagaattaggtgcatattctgaaaaaataaaaatatctactgaatcaaagataataggaaaatctcttgaaagagctaatttaaaatatattccagttaaggacatgattaaagattataaaaattactatgagaaattagctaattttgatgataagacattaggaggcaaagtaccagatgaagcaatatactttgttgagaaataaaaaaaataaagaacaatttatagataaaatggaggtaacactttcttgtgttatcctcttatttttatggcaaattattgctttaaaaattgataatgatatttttttaccaacagtaggtcaagtatttaatagtataaaagagattatgctaaattctagtttctatatagatatactttactctatggggagatgtttttttagttttttactggctatgatttttgccattatactttcaatagtatcttatttaaatagattttttagaaacttattaaagccaatcaatgctttgacacgttcaataccaactatgatattggtagtacttgcacttatttggtttgaaaaggatagtaccccttttatagttggatttactatagtttttcctatattgtatgataacgttttgggcgctatattgaatatagacaagaacttattagaaatggctaatgtgtataaaataaggtttatagataaggtgttaaaaatttatttaccagccataaaatttcaaattatatctatactagtatcaacattctctttaagtttgaaagttgctatagcaggagaggtatatagtcaacctacatatggtattggaactatgatacagactgaaaaaattaactttaatacatctggaatatttgcatggataattattgttcttttaatatctgctattttacaaatagcccaaaagtttttagcaaggagagcttttttatggaaaagataaagttgagtattgaaaatataaataaaagatatgatagtcgtattatatttagagattttaatattgatttttatgtaaatgaggtaaattgtatccttggaaaatctggttgtggaaaaactacactcttgaacataataagtgggattattaaaaatgacaccaacaatctaaatatcaaagaaaatttaaatagagtaggaaataagcttgaagctagttacatatttcaagatgatagacttatagactggttaacagtagaagaaaatataaagatagttgtaaataaatactataataaaactcaattaaataaaatttgtgatgaatacttggaattggttggaattagtgattataaaaaattctatcctcagatgcttagtggaggtattagacaaagagtaaatattgctagagcttttatatatccatcaaaaaacattataatggatgaaccttttaaatctattgatgcaaagaatacacagcttataatggataatttcagaaatatattaagaaaagaaaagagaactgtattatttgtaactcataatattgaggaagcattgtttttagcagataggatatttattttaggagactctccaattagaataaaaaaaatattaaaaaattctaaggaattggaaaaaaatgaagttttgaagttgatatagagttataataatactgtcgttttaaaatatatttggttaaaatctataagactatattaaaatagtacagaatattcaaaactgtgtataatgttcgtattttataaaaaggaagtgaatgtatggttaagactaatgctatgagaatattagattcaaataagattgattataaagtaatgtcttatgaagtgaaaagtgaacatgtggatggtgttgaggtggcacatgatataggaagagatgtaaatgaagtgtataagacattagtaactcaaggagttagtaagaatatatatgtatatgtaataccagtacatgaaaacttagacttaaaaaaggctgcaaaagtagctaaagagaaaagtgtagagatgattcatgtaaaagatataaataagcttacaggttatattagaggcggatgttctcctataggtatgaaaaagctttataaaacttttgtaaatgaaagtgcaaagaatttagatacaattattgtgagtgcaggaaaaataggatatcaaatagaactatctccatttgatttacaaagacttataaaagtagaatttgtagatgtaataaaaaaataagaattacatataaaatatagagcttatattcttaataataggtgttgtaatattaataaaatgaataataattttaaaataaatattcagttacttatgtgtaattggtataaaaatattgagaaattttaaaaacaatggtaaagtgtaagtataatcacgaatattttttataaagtaatggagggatgttcgcttgagaaaaataaaatctgaacaaatcgtcgagcaggtaaaaaaactttgtatagaagcgagcctatatttaggagaagatgttttaagttgtataaaagaaaaagcgaaaagcgaaaagagtgaagttggaaaaaatatattgaatatattagttgaaaatgctgaaatagctaaagaaaaaaatataccaatatgccaagatactggtatggctgtattttttgttgaaataggacaagaagttttaattgaaggagacacacttactgatgctataaatgagggagtaagacaagggtatgaagaaggctacttaagaaaatctgttgtaagtccaattaacagagtaaatacaaaagataatacacctgctgttattcattatgatatggtaaaaggtgataaaattaaaatagaatttgcagctaagggatttggaagcgaaaatatgagtaagatgaaaatgttaaagccatcagatggattggaaggaattaaaaaattcataatagatacagtttcagaagctggacctaacccatgccctcctatggtaattggagttggtataggtgggactgtggacaaatgtgctcaaatagctaaaaaggcactttttagagaactaggtgaatttaataaggacgaaaatatagcaaaacttgaaagtgaactattaacagctattaataaacttggtataggacctcaaggcttaggtggtactacaacagctttgggattaaacatagagacttttcctacacacatagcaggtctacctgttgttgtaaatataaactgccatgcatcaagacataagaaggtagtaatttaggaggaaaataaaatgataaaaataactacacctgtaaatgaaattgatatagcaaaattaaattgtggagatacaattagtttgagtggtatactttatacagcaagagatgctgctcataaaagattgatagattgtataaataaaggtgaagaattaccatttgacgtatatggtcaaggaatatattatgtaggacctactcctacaaagccaggagaagttataggtgctgcaggtccaacgacgagttatagaatggatgatttgactatacctcttttagaaagaggtcttagattgatgataggcaagggaaaaagaagtgatgaagttatagaaggtatgcaaaaatacggagcagtttatcttgctgcaataggaggagctggagcgtatatttcaaattcaataaaatcatgtgaaattattgcatatgaagatttaggagctgaagctataagaaagattgtagtagaagaccttaaacttacagtagcaatagatagctatggaaataatatatatgagcaaggtcgagcaatttatgaatgtaaataatgtttagaaataaatatgaatatcaaaattaaaaatagttgtgtatattttaaggaggaaaattgatgtctaaggattatgcaaaattggcattagaaatgcatgaaatcaacaaagggaaagtaagtgtagaaagcaaggtagaagttaaaactaaggatgatttatcaacagcatatacaccaggggttgctgaaccttgtttaaaaatacatgaaaatcaagatgatgtttatatatacacttctaaagggaatctagtagcagtagttagtgatggaagtgctgtacttggattaggtaacattggtgctgaagcatctatacctgttatggaaggtaaagctatattatttaaacaatttgcagatgtagacgcttttccaatatgtttaaagactaatgatgtagatgagatagttaaatctgtagagttgatggagcctgtatttggaggtataaatttggaagacatatcttctccaagatgttttgagatagaagagagattaaaaaaatctttaagtatacctgtttttcatgatgaccaacatgggacagcaataatagttgcagcagccataataaactcaataaagttaattgaaaataaaaaaatagaagatttagaaatagttataaacggagcaggagctgctggtatagccatagcaaagatactacttaatatgaatgttaaaaatataatcttatgtgatagaagtggagcattggaagctagtatagaaaatctaaactatgttcaaaaagaaatgttaaaagtaacaaatataagaaatgaaaaaggacctttaaaagatattataaaaggaaaagatgtatttattggtgtttcaggtccaggagctgttacaaaggaaatggttgaaagtatgtctgagaagccaataatattggcaatggcaaatcctactccagagataatgccagaagaagcaaaattaggtggagcatttataatgggaacaggtcgttcagacttccctaatcaagtcaataatgtactggcttttcctggaatatttagaggagcattagatgttaaggctaaagagataaatgaagaaatgaagatagctgctgcatatgcaattgctaatacaataagtgatgaagaaatatgcccagagtatatattaccagatgtatttaataagaatgtagtaaaaaatgttgctaaggcagttaaagaagcagcgataaaaactaaagtaaatagaatataaatttttataacttattaaaaactagaaaagtataaaagactagtgaaattatgtacagtgggatgattttattagtctttttattttaaatatgacacaataatgtcatattaagcttgatataattttaatatggttaggagccaaagaaaaatataaggagtgatttaaaatggaagaaactaaattttgccaatgctgtgcaatgccaatgggacaaactgatgaattatatgggacaaataaagatggaagtaaaagtactgattattgtagttattgttttaaagatggtgagtttacagctgatataagtatggaagagatgatagaagtttgtatccctcatatgcttcaaagtaataaggatatgactgaagatgaagcaagaacaatgatgaacaatttctttccaacattaaaacgctggaaataattttatgcaaaattagttatatgcaaaacatgaaatatggtgttgagaataaggggtggtgtgctttatagcataccacctgttttgttacttgctagttcagttattcttgtatgcttaaatatgttctcatctctctttctattttaaattgtaaaaatctaaaatatgttatttatattctacttctttatccatgtctttttctacctcaagtcaaatacaactacaaaatcatcattttcaattcactgtttaatagaattaacagataaagagttataaaattttctattttttatataaaataatacaggtcaagctgacttctagctacttgggatagtgtatatatttatgatagttataggagtaataccaatcattagactgttgatttgtgtagtcttttgtaaaaacatttgttttaatatattgagtttttgaaaaagtaaaattataattataataaattaagtgtaataatgtattagaagtaaaaataattaaaatagaggtgattaaatgagcagtatattgttagttgaagatgatttaagcttgatatatggattagagttctctatacaaaaaagtggatttagtatagacatagcaaggacagtaaaagaagctatgcaaatgtatgaggaaaaaaattatgacttattgcttttagatgtatccctacctgatggtaatggatttcagatttgcgaaaaagtacgagaggtttctaatatacccattatatttttgactgcttcagatgaagaggtaaatgtagtgatgggtcttgatatgggtggcgacgattatataacaaaaccttttaaattaaatgaattaatttcaagaataaaagcattacttagacgttataatgttgcaagtaatgtgaatgaattaagttcaaataatattactattaaattacttgaaaatcgtgtttttaaaggtgaatttgaggtggaacttactacagcagaatataaattattgtgcttatttatgaaaaataaaaatattgtacttactagaaaaaacatattggacaagttatgggatggaaatggtagctttatagatgacaatacattatcagtatatgtaagacgattgagaaataaaattgaagataatcctgaaaatcctaagtttctattgaccgttagaagaatgggttataagtggaatgtaattaagtgagggtattaatatgaagatattttctaataaagatataaaaatattttttttaattcttatatctattttagtaatgtttattatagtagggcaaatagtggttataagtataactaacaattataaaaaaacgttgatagaacatgattataatatagctggatacttatatagtataggtgttgataaatctaaaataccatcagcatttgttgcacatgaagataaatatattttaaaaggaaaagaaatactagatacagctggatatggatttgatatagatgttagctttacaccaagtgtaaaattgtttcaaagtaaatatataaaaactatgtctatctatttattagtattttttactatgattattttcatactatatatgtatttttttaggcaacaaagtaagatagaagaggctagttataaaattgatttatttatgaatggaaatataaatgaaagactaaatacatatgaagaaggtagcttatcaaaattatttagttcaatagatgttatgtcgacatctttaaatacacatatattaaaagaaaaacagagcagagaatttcttaaaaatacaatttcggatatatcgcatcaattaaaaactccacttacagctttaataatgtacaatcagatactacaagaagaaagtcataatagtgatgtcgttgaagcttttgtacaaaaaagtcaaagtgaactagaacgcattgaaacattgattaagaatttactaaagattacaaagatagattcaaaaacaatagttctcaataaaaataatgttaatcttaaaaatttaattgtcaaaattttgtatagctttgaaactagggcagaaaaagaaggaaaggttatttctataaatggttcagaaaatacattgttgttctgcgattatgaatggatgtcagaggctttaagtaatcttataaagaatgcattagataatacaaaagagaatgataaaataacgatagagtggtttgagacgactataaccaccattgtttcagttaaagacactggaaatggaatccatgttgaggatattcatcatatatttaaaaggttttatagaagtaagttttcaaaagataatcaaggtttaggactgggattaccactagttaaatctattgtggaacaacataatggtactatttctgtagaaagtaaactatcacaaggaagtacattcaccataagttttttaaagcttactaatatgtaagataaaatacatcttgcagtaaggtatatagattattattatattaatcaattagaaaggtgagagagaaaatggatattcttgtggttaataatttatgtaaaacatatggaaatggatatacaaaagtagaggcattgaaagatgtatcctttacagtttcaaaaggagagtttgtgactgtagttggagaatctggttcaggaaagagtacactattaaatctcttaggaggtcttgatactccaacatcagggagaatatttattgatggtaaagaaatatgttcaatgaaagaggaaaaacagactatttttagacgtcgtaacatagggtttatatttcaggcatataaccttataccagaactaactgtggagcaaaatataatattcccattgttattagattataaaaaaccagatactatttacttagatgaagtattgactattttaggtcttaaagataggaaaaatcatcttccaaatcaattatctggtggtcaacaacagagagttgcaattggaagggctttgattacaaagccaagtattatactggcagatgagccaacgggaaatcttgacagtaaaaatagtaatgatgtaatttcacttttaaaagtgactgcagaaaagtataatcaaaccattattatgataactcataatacgaatatagcttctacagcagatagaatactacaggtttctgatggtgtgcttacagacctgggggtgaatagagaatgagaagctacttagaattagtaccacaatatgcaaaagtacataagaaaaaaaatagaactacaattttatgtattattattgcagtatgcttagttactgctatctttggacttgcagatatggctatacaatgtcaaaagatacaatttattaaagatgatggaaattggcacatagtaattagaaatattgatgaaaagtttatatcagaaataaatagtagagtagatatagctcaccatggtagggggcaagtcgttgacagtggagagtttaaatcaaaggagattttgatacaaggtttagatgaagaagtagcaaaacaatttaacttagaaataataaggggtcgttatcctattggggagaatgagactttaatagatgaggatgcagttaaaagctttaatctaaaaataggagattttatcaaaataaaattagcagatggtagaaataaaaattataagatagtaggtgaatattcatcaatatcaagcttaagagctacagataaacatggattaatactttcaatattgggtacacaagctattaaaaaatcagaaacgtacgattattattatattacatttaaagaaaaggttaatattagaaaagccacttctgatattaaaaataccttcaatttaagtgataaacaaatcggtaaaaatgaaagattactttctattataggtcaaggcgactctgacttttctaaaccactgtatttaacagcaggattactttttgtacttgttttagtagcaagtattatcatgatatataatagttttaacatgagtgtaattgagagagttaaattttttggtctgttacgttgtctagggtcatcaaaacatcaagttaaaaaatttgttgttttagaaagtttaattttaagtataaaagctattccaataggcttagtattaggaagtcttgtaactattatatcttctatatttcttaagtatgttaatgagttattcagctcaatgccaattttaaaagttagttttattggtattgcatttggaataattgtagggtttttaactgtaatattatcagctattattccagcaaaaaaagcttcccgtgtatctccacttagcgctgtacgtgggaatctaatgtccaaagaaattttaaataacgggaagacaagtaaagttgcaaatacaggaagttttaaaattgagacttctatgggattaaatcatgctttttcaagaaagaaatcttttgtacttatgacttcttcatttgccattagtattatactatttttaggttttagtgtgcttatagaccttatgtatcaaggacttaagcctatgaagccagaagctcctcatatatctattgttgaccctaattttaagtctgttttaactaaggaagatattaatgaaataagcaatatcaaaggagtaaagaaagtatacagtagaatgatgacggatatagaagctacatataatgggaagaagacaaaatcacaattaatttcttatgaaaagtatcaatttaattgggcaaaaaaatatctattaaaaggagaagttaatgaaaataaactacagtcagaaaaccttgcattagtagaagaggggcatggatttgatataggagataagatatatattaaaaatagaaatgctgaaaaagagttagaggtaggaggtatactttcctcaattccatttgaggctaaagataaatatattggaaatattataacatctgaaaatacttttacgaatataacaggtataaagggttatataataatggatattcaggttgataaagatactcctggagatttaattgaaaatataagacgtgtagtagatgataacttagaggtcagagataaaagacaaagtaacttagaggttaaaaattcgttttatactatggcaacatttgtatatggatttgtgtttattattgcgattataagcatgtttaatatcataaatagcatgaatataagtgttacaagtagaaagaattactatggtgttatgcgtgcagtaggcatatccaacagacaattaagaagaatggtaatagtagaggcaggttcatatgcaatgagtggttgtttattaggtagtatactaggattaatgttacataggtatatgtttatatcgttagtaagttcaatgtttcatttagagtggcaagtaccttttaatttactacttatcactgtactaactatgataataataactttattatcagtaagaaaaccagtcaaaaagatttgtgaattagatataatagactcaataaatgcacaataaatatagctgttgatttaaattaaaaaaacgaagtaaaaatgaaatagaaaatatttttcatttttacttcgttttttatattataaaatttttgttatgttacaaaatttctataaagatgatgtgaatctaaacattatatgacaacgtgagcatttaagttaaaatattttaaatatactattttagataagttccttcttcatcttgataaattaatccttttttcataagcactccaagagctcgtttaaaatttttcttacttgaattaaataatatagaaatatctttagggtcagatttatcattaaatctcatatatccatcagaaccctctaaataacttaaaatcttattttctaaagtatcaagttcatcctttctatttcctctaggagaaagaccaagttttccatcttcatatatttttatgacatgtaaattttcaagaacatcaccagcttttagttcagtaaagtactcattatgaagtattacaccagcatatttattgtctacacatatcattgcagaattattagtttgaaatccatatacaactccagttacaatatctcctacattgtaagtatggtctgttaataaatatgaatctatatctgtagtagcagcaattcttttgcttttgtctaaatatatataaaataaatatttttcgtctctaaatagtggataagtcttagctttaaaaggaactagtatgtctttaggaagtcccatatctataaaagtaccaatgtccgtattatcaactacttttaaatgtgctacatccccaaccttagctaaaggcggtattaaagttgcagcagttctgtcatcagaatctttaaatatgaaagcatttacttcatcacctatgtttatttcattttttccgattaatctattatgaagaagtatatcgtcttttgtgttattagtttgtccatccaaaaaatatccaaattcagtttttctttttactgtaagtttattaaaatcacctatgtttatcaaattaaaatcatcctctcattttatatttataatttagccataatatacttatgtagtagtttgtcacagtatctatattagtattagtgaaatttacaataaataatatagttatttatgtatttttcaattctctagcttcttatatagtataaactccaatttcttttttgtctttaggttttactaaaatttttacaaaataagttaaaaagtattgaaataaaatttcttttaaagtataattggtatataccaaaattggtatataccatatcgaaaagtggtgactatatgaaaatagtaaataaatctagtaatataccattgcatactcaattaagttcaataataagagagatgatagaaactggtgagcttaaagagggtgatgcaataatgccagaaagagaactttgcaacatacaaaatgtaagtcgtatgacagtaaataaaaccattgttggattagtcacagaaggacttctttatagggtacaaggtaaagggacattcgttgcaaagcaaaaaaagaagtatcagttttcaaatgtaaaaggttttactgatgttatgaaagaaaagggagtaaacataaaaacggatatattatcctttgagatggaactaccagatgatttagttaaaagaaagcttggaataagtgataatactacaaatatatataagattgtcagacttagatatactgatggagagccatttggattagaaatagtatatctatcagaagaaatgtgtaaaggtctaacaaaagggatattggataattcttcattatatagggttttaaatgaaaaatatggctataagatacaaaaagctgaacaagtaatggagccagtaatactttcagatgaagaaagtaagcttcttgaaacagatgaaggtgctttagctcttaaacttcatagaaattcctataatagagaaggtagccctatagaatataccatatcaatatttagaacagataaatatcaatatgaaatagtattgagtgagtaggtgaataatatgaaatgtttaattaatggaaagataatattaaaaaatcaaatcttggaaaataaagtattagtatttgatgaaaaaataattgatatagctgatagtgtaccaaaagattgtgaagttatagatgctgatggaaaatatatatctccagggcttattgatattcatatacatggaaatatgggaaaagatacaatggattcgactgatgaatctattgaaacaatttcaaaatcaattatgagacatggagtaacatcttttcttccaactacaatgactatggataaagaacatgtttatgatgcacttgaagttattaaaaaagcccaaaatagaaagcttgaaggggcacaagtattaggagcacatttagaaggaccttttataaatgagaattataagggagcacaaaatgaaaaatttataataaattcaaaatacgaatttataaaagaatataaagatgttataaaagttataacttatgctccagaaaaagatattgattttgattttactagagaaataaaaagatgtacagatatagttttatctattggtcatagtaatgcaaattatgaccaagctaaagaagctataaatttaggagtaactaatataactcacatgttcaatgcaatgactggtttaaaccatagagacccaggcgttgttggtgcagcacttacaactaatgtgtacagtgagctaatagcagatacaatccatataaataaagatttatttcaatttatactaaataataaagggaaagaaagactgattttaataacagattctatagaagctggtggtcttgaagatggcaattattctcttggaggtcagaaagtcatagttaagggtaatgaagctagacttgaaaatggagcattagctggaagtgtgttgtctttaaataaaatggtatttaacttcttagataatacaaaccttaaagtgaatgaagcaattaatttagcttctttaaatccagcaacatctttgggaataaatgacaaaaaaggaagcttagaaataggtaaggatgcagatatagctgtatttgatgagaatttagattgtaaaatgacactttgcttgggggacgtagtatataaaaatatatagtatacaaaacaaactttaaagacagtaaaaacaatataaaaaataataaattaaacttacattagttaaagtagtagttaaaatttaggaggaataagatgagagtattagtgtgtaaagattatgatggaatgagtaaaaaagccgctgaaatgatagcagctcaaatagttttaaaaccaaattcaatactgggactagctacaggaagtacaccagtaggtatgtatagagatttagtaaaaaaatacaatgataatatagtagatttttcagatgtgatgagctttaatttagatgaatattataagttaccaatatctaatgaccaaagctatgattattttatgaaagagaatctatttaatcatgtaaacataaagctagaaaatactcatctaccaaatggaatggctgatgatattgaaaaagagtgtctgaactatgaagcttctatagatgcagctggtggtatagatgtacaagtacttggaataggtcgtaatgctcatataggttttaatgaacctgatactaaatttgcaaaaagaactcatgtagttgaacttacagagtctacaatagaagctaatgcaagattctttaaatcaagagaagatgttcctaaaaaagctgtaagtatgggaataggttcaatattgaagtctaagaaaatattgcttttagcttcaggagaagaaaaagctgatgcagtatataatactgtttacggagatataactccagaagttcctggttctatacttcaacttcataaagacactatagttatagtagatgaagcagcagcaagtaaactgaatccaaaagattataaattagtataagaatagaatgtagtttaagtgaaaaatagctatcattgaataatcaaatttatttaatgatagctatttttatttaaattttttacttctttttatttaaattagttattattgtttaaattacttgcttattactttttacgaaaactcgttatcaagaagtatccgaataagatgttaaaaattattatgtttagtgggattctatcaagcataataaaattacctataattgggatattaccaattggaaacataaagaagaatacaggcatcagtgatagtaaaaaagatggaaaacaaagaagaagtaatcttggaatatcaatataccaactaccatcctttttgtattctctaatcaataattcagttcctagtaacaaaccaataccaccagaggaaattaaattaataaaaatgtatcttttaaagtcttgcatataaccagtgtgaaattgagtatagaaatcataatttaatttaacggctaaaaaatatataagcaatagaatgattaaaaataaaagatatctaagagcttttttcattttaaattctcccttcagaaatactttattcagttttattttgttggaatctgattttatcatttagtttaagaaatccataatattagtgaagaatgaaataagtattatatatgaataaatatttttagaattaaggtgaactgtagtgcttaatataactataatattaattgtttgaatattcaataaaaagtttaaaaaatatcaattttgatataaactgaataaatacagttgaatattaaattattattttatcaaaaatatgcaaagtactacaccttcaaatatcacctaaagtaattaaaaggcaattaaagtgaagtagttcaagtatttctaaaatgagtttaataaattctataataatttattttttgccttaaaattgccttaaaatccaaacaattttaaaactaatgtactataaaaagctggtataatttaaatatagtaaaaaataagatttatcttatctattgggatttaattatttaatcaatatatttataccatttaatttaaataaaaagtctattaaggagtgagcttatgagtaagttaatttatatagcagatgatgaagataatataagaaatttggtaaagacattcttaaaaaatgaaggtcatgatgttatggattttaaaacgggtgatgaacttttagaacaatttaatataaaggagtgtgacttagtaatactagatataatgatgcctggctcaagtggttttgaagtatgtacaaaacttcgtgagaaaagtacagtcccaataatcatgcttactgcaagagatacagatatagattatattacagggataaccttaggtagtgatgattattttacaaaaccatttagcccaatgtctttggttatgagagtaaaatctatatttagaaggatagagtttgaaaagaaacaaaattatgataaatatagtaactcgatagatatggaattaaaatttggtgatgtaataataaataaaaagaataaaatcgttacaagtaaaaatgtaaatatagaccttacaccaaatgaatataatctattgacttatttgtttgaaaatatagatagagcagtttccagagatgaattattaaacaaaatatggggatacgatatagaagttgagacaagggctgctgatgatacagtgaagagattacgtaaaaaaattttagatacaaatattttaatagaaactgtatgggggtttggatttaggttgaaggagaaaagttaagatgaataatggaaatgacaagaatagaattggaaagattaaatccaaatttaaattaaagttctcaaagaaaaatataagcataaaaactaggattttgttgagcatactttgtttgataattatagtatttatgataatattagtatcttttaatgtatttcttgatacatatataaaaacaactgcgaatgaagaattgacgaagtctacagaaatagtagaacatatggatagtaattttagacctattaagccaccacaagatgatggaaagcttcctcccaaagtattatctaattttatgagaaatgtacaagataaagttaggatggcagaaacacaatcagatgctgatgctatggtagttgattctaagtataacctgatatttccaacaagagaggatgatttcttaaaaaatgttgatgagatggagctgattagggagtgtattcaaaatgaaaaattagatttaaattcagatgaaaatacacggatatctaccagaaataaggattattatatttcaactgtaaaaattactagtatatatggtgaacaagacaaatatcttatactttttatagacatatcaaaaactctaaatctagcacaaaagataaatattgtattaatatctgtaatgtgttttgctggaatattagcaatatttacagctgtgattttatctgagaaaattgctaaaccgataaaagagttgtgtgagtttgcaaaaaaaatgggtcaaggagatttcaaaagaacctactttgacttttcagataaagaattagtagagctctcaactgttatgaataagagtgctgagtatctggataagtatgataatgaacaaaaaatattttttcaaaatgcatctcatgaattaaggacaccactcatgtctattaaaggttatgcagaagctataaaatataatgttatagatagtaaacatgcaagtgatataattcttgaagaaagtgataggttaagtgatatggttgaagatttattatacatttctaaaatagataatataactaaagattttgaacttgtagaatgtgatttaagagaagtattttcaaattgtggagctaggcaaaatgtaagagctataaataaggggataaaatttatttatgaatttgatgaagaaatggttttatttgaatgtgatgaaaaaaacatttccaaagcatttatgaatcttatagaaaatgctttgagatacgctaagagtgaaataaaaatagtgtgtaagtataatcaaaaaaatatagttgtgataatagaagatgatggaattggaatcaagaaagaagatttacctcatgtttttgaaagattctataagggagtagggggaaatcatggaattggattatcaatagttaaatctattgtaaataagcatggtgggcgtatatacgtagaaaatggcaaaaaaggagctaagtttactatattatttaaattgtaaaaaaattagagaaaatataaagatgtttgaagttgttttttatatatatctgttgtatactgttgaaaaaagaacaatattaagctgacatatattacaataattgacatttaaagtaaatgcttaaatatagatacgaaaggaaaagtaaaatctgaagtgtatttaggtttaagtaagcttcttattttataaaaaatatgtatgaaagaacagctgatttttaatattacaaatttagtaacggttgtatttgaagcttttgtcatccatatgtttttatcagactttttaggtcagaaagaagggtatataaaagttgtaagatatgctaaactgggttttataatatgtttaggattctgtaatttaataactttaaaccctaaaatcacaatgcctttaatttttatccttattttttcaacatcatttttatataaaggaaatttaaagacacgattgtttactactgttttattaagtatattctttatactgtcagaaattgtagttacaagtatttttgttttatttgtaaaagaaggctttgaaataatgcttgaaaataatagtataagagtattggcgacaattttatctaaaattgtctttttgttgacttgtaaaattatttgtctatttaaaaaagatgtacatttagatatgcccataaagtattggctccctttatttttaatacctatatttagtttatttctgtctgtttctatctttgatgtaagtaaattttttagtcttgaaagtttaaaatttctaagtttaatatctagtgttggcattttatatattaattttattgtattttatttatttaaatttattatagataaaactaaactatctatgaaatatgaaatacttgaaaaagaaataattcataaggaagaattaagacttagtaatgagtgttataaaattattgttgaacagactgattctgtcgttttcgaatggaatatcaaagaaaataaatcatttgtatcgcaggcttggactgaaaaatttggatataacaatgcatgtaagaatatttttaaagaaattaaagataaagacttagttcattctgaagataaagctatatttgaaggttttcttgaaagtattaaaaaaaagaatatacacagtcaagcagtatatcgtttaaaaaaatctaatggtgaatatatttggtgtagaacatcaattacaagcatttataatgatgaaaatgaacttttaagagttgtaggagtaattgtagacgtagatagtgatataaaaaaatatgaagagttaagaactagagcagaaagtgactcattgaccaatatatacaataaaggtacatttgaaaaattagtggaagaaactatagttatgaatacaggtgataaaaaagatgcattattcattattgatttagatgattttaaagaaataaatgataattttggtcatccatttggtgattttgtactaaaaacatttgctgataagatacaagctagttttggtaataaagacttagtcggaagaattggtggagatgaatttgttgtatatatgcaagattatgttacagaagtaaatttgcataaaaaagctaaagaattaaatagagtactttcggataattacactgatttgagttttagttttgattcttctgtcagtataggtattgcaaggtatcctcaagatggaacttcattttttgaattgtttaaaaatgcagatagagcactttatagcataaaagcatcaggtaaaaattcatattgtttatttgaagaagaactatatgtacagtgaatttgaatttagattttatgtgagagtaagatttatatatacttgtggctgtctgatttataaaatatgttactttgtatatttttatatgtttcagtaaggttaattaacataagcaaaggtgtaagtaaatttatattagtttaagtttacttacacctttataaaaataaattttgtaaatttaaacagttggttttataaggatttttatttattttaatatcttagatattcctttttgtattccttagagaaaataaataatgaaaggagtacagaaaaaattaaacatcctaatataccacttgaattaagtcttaaagcattaaagtttaaaaaagcattatttaaatcggtatccaaaagaaaaggatgctttgatttgctatatatggaaaaattaaaaatatattcataatcaaatttataaaattaatatctttccatcctaacattacatttacttagattaattattattataaaaataaaaatacaaataatagattcatttacattcttaaatgattaaagctctttaccctttaaacatgcataacatatcgttataattccagtaaataagactaaaatgcccattcctaaaattgcagtttcatcatctattactccaaatgcttttaaagtaacttatttcgctttgtataataataatttgtctctttttatattttaacttctgctgagatttgagttagatattcgttagaatctcgcacacttatatcatatagaagatattcttcataaacaaaatccccaatacgtaaattattctgattaaaaaaatttaataacttttcataagccttgtaaatagtttcataactacctttatgataagcagttacataaagtccctttggtttgattgatacaggatatttcttgtactctttattaacttttgtaaataaatatgaatatgattcaaagtctttattaattatatcttcacctttaatgattgagccaatcgtaccatagtcactcaattcatagttgtccataaagttaatacattcatataaaaaattttcttcctcatctcctaaaaactgttctttatatgtaataggtgttttgaccaagtactcttcctcatgttcttttaaagtaatagtattcgcatctatattacaggcatttttagtgaatgaaatagtagattccattagagcttgaatattatttagtttttcaatttcatttttaatatcaatggttttcttttctaaaagctcaattagtaaattaggtgttcttttgtctatataagctttaatttcttttaaaggcatttttacttccctaagtgaagaaattataccaaaaatgctaagttgatggtatgagtagtatctatatccattttctttctttaattctggtgagaaaagacctatatcatcataatggaaaagtgtttttttattgattccacaaatctttgcaaattctccagttgtaaaataattttttgaaacttgactcataattataattcctccttgactatcctgttacagtatagtttatcatagtattttgtaaaggagtgtgattatatgaaaaaattaattcattttttaaaaccatatagagttttaattgttgtagttttgatatttacgtttttacaaacacttggaactttgtatataccaacacttacagcaaatatagtaaacaatggtgtagtaaagggagatatagattatattgtaaaaacaggtttaataatgatgatagtagctggtataacagctttatcagctgtgttagtttgtaaagtatcagcaaatctttcatctggattttgtagagatattagagaagcagtatttgtaaaatcacaagatttatcaataaatgattttaataatataggtacagcatcaatgattactaggagtactagtgatattactttaataggtcagtctgtgtttatgtttattcaattggtattaccagcaccaattataactgtttctggtctattcttagcatattctatagataaagcaatgacaattattattgttgtagtaatgtttttattcatgctttcagcatttttagttggtaaaaagcttataaagttgtttaaaatgatgcaaataaagatggacaatatgaatagggtattacgtgaggtagtaactggagtaagagttataagagcttttaatagggagcattttgaaaaaaagagatttgatagaactgcaatagattattctgaaacagcaatttcaataaataaagtatttgcagtacttatgcctattgtaatgttaataatgaatttaggtatagtaagtattatttggtttggtgggatgagagtcagtaatggaaatatggagataggtcatataatggcacttattgaatattgtatcttaattttattctatttaatcatgggagtaatggtatttatgtacatacctagagcaggtgcatgtgcagatagagtaaatcagatattagatatagaacctgaaattgtagatggaaatggtcgtaaagatactgtctcagagaggggacatttagtatttaaaaatgtaacattttcatatgcacaatcagaagaacctgtgttaaataatataacatttgaagcaaaatctggagaagtaactgcaattataggaagcactggctcaggcaaatctactattgcaaatataataccacgtttttttgaaattcaatctggagaaatatctataaatggtcaggatgttaagaagattcctcaaaaagaacttagagataagattggatttgtgccacaaaaagcttttttatttagtggaacaatagaagaaaatataaggtatggaaaagaagatgcaagtattgaagaaataaagcatgctgcaagtatagctcaagctgatgaatttatttctgatatggaagacaagtatgactcatttgtagcacaaggtggaaataatttgtcaggtggtcaaaaacagagaatatccattgcaagagcgttagttagaaagcctgaagtatatgtctttgatgatagtttttctgcattagattttaaaacagataaaagacttagaaaagcgttgaaaaatgaaatcaaagattcatcagctataattatagcacaacgtataagtacaatcatggatgctaatcagattatagttttaaatgatggaaaaattgtaggtattggaaaacataaagatttacttgaaaattgtgaagtttataagcaaattgcggattcacaacttagtaaagaagaacttgcataaaatgaagaattaatctgatatttggaggtgtatgatatgagtgaaaaaagaatagatgaacaagatatagaagtacttagttttgaagatggcatgtcagcagaaaaagttaaggatgcaaaaaaaactactaagagattattaaaatatatggcaaaacaaaagtttaaaatattaattatttttatttcagtattgataagttcagcgcttacagttttagcacctatggttatgggaaaagctattgaccaactatttaatggaataaaaactgcagtccaaacaggtacaaaattcagtgtgaattttagtactatgggggggatagtatcaatacttctagggttgtacttaattagtgcagtatttatatatattcaacagtatattatgtcaggagttgcacaaaatctagttcttagcatgagaaaagatttaagtgataaactcaataaacttcctcttaagtactatgattctcataaaaagggggaaacacttagtatagtaacaaatgatttagaaaaagtagcagatagtttacaagaaggattaatgcaacttattacagcagtagttacagtagttggttctattgtaatgatgataagtataagtgtaccacttacaatagtatcagctataacattacttgtttcattgggtattactgttgtaattgcaagaaaatcacaagaaagattctctgaaaatcaaaaggcactaggagagttaaatagcaatatagaagagatatttactggtcaaatagtggttaaagcatttagtaaagaaaaggatactataagaaactttaaaatattaaatcaaaatctttataatgcaagtagaagagcacagttttcgtcatatgcaatatctccaattattagatttataaacctaattggctatgttattatagcagttgtaggtgggatatttgcatcaactggagcaatgactcttggtagtatacaagcgtttattcaatatgtaaatcaagcatcagagcctactacagaaatatcttatattgtaaatatgcttcaagcagcaatagcatctgcagagagagtttttacagttatggatgaggtggaagagataaaggatgaagaatcttcaaaggttattagcatgcctaaaggtaaagtacaatttgagcatgttaaatttggatatagtgatgattttattcttatgaaagatattaatatcaatctaaatgcaggagacaagattgcaattgttggacctacaggagctggaaagacaactcttgtaaatttacttatgagattttatgagatacaaggtggaagaattactattgatggtgttaatataaaagacttaaagcgtggagaacttagaactatgtttggtatggttcttcaagatacatggctgtttaatggaagtataaaagaaaatattgcatatagtaagtcagatgccacaatggatgaaattgtaagagcagcaaaatcagcaagagtagaccattttataaggactttaccacaagggtatgacactatattgactgaggatgcttctaatctatctcaaggtcaaaagcaacttctaacaattgccagggcaatactttcagacccatcagtattgattcttgatgaagcaacatctagtgtagatactagaacagaggtagaaattcaaaaggcaatgaataacttgatgaagggaagaactagttttgttattgcacatagattatcaactattcgagatgctgatttaatattagtaatgaaagaaggcactattattgaacaaggaagccataaggaacttattgaaaagaaaggattctatgaagaactttataatagtcaattttcaagtgaatatgatgaagaagttgtatgattatcaagttttaggcaactaaatgattgataaatattaagttaaatatagtaacatgtaaggttatatggaataagagtatttctctatttcatataaccttttttatttatcaaaataagataaaattttctttctaaattagattgaagaaagtatttatcaatataaaagtaaaataatcattattattagtgaagtaaatattgtttgccacatatatgccataaagatgcacttattttacggagatttaacaaagtagtgtaaagtatactctaaatataaaataaatcaaatagagttaaataaattgagaggtgatataaatagtgaataaaaaattgaactatagatttgaaatgaagcacaaaataactgaagcagatgtgttagctttaaaatcaagactctatccaataatgaagaaagatgaaaatgcatctaaagatggaaaatatcttattaggagtttatattttgatactcctgaagataaagcacttttagataaattaaatggcgttgcaataagagaaaagtttaggataagattttataataataactgctcttatataaggttagagaaaaaaatcaaacattacaacatgacatcaaagctatcaactaatttaaccaaaaaagaagtaataaatatactaaacaatgatattgaatttctaaaagagtcgacaaattgtttattaagagaattttatttgaaattaaaatgtgaaagattagaggcaaaaagcatagttgattacaatagagaagcttttatttatccagttggaaatgtaagagttacaatcgatagtgatattaaaacttctgtaaattcgatagatttatttaataaagatttgccgactgtttcggtaattgatgagaatatgactgtattggaggttaaatatgatgaatttataccagattttataaaggatttaattcaaattaataagactacttctacagcagtttcaaagtatgcttcaagtagattatatatttaagaataaaggctatgatttatataaagatatacataaataaggttaaaaaacaaataggttaaaaataaataaaataaaaaataaataagttaaaaataggaaggatgattttaattatgacatttaatgatatttttaaatcaagttttatagaaaacgtatcaggtttttcatttgtggacagtgctttagcactaggttcagcttttttagtaggtttgtttatatatatggtctataaaaagacttatatgggaattatgtattctcgaccattcaatgtgtcgcttgtagcacttacaatgcttacaacttttgtaatattggcggttacttcaaatgtagttttatccttaggtatggttggtgctttatctatagtaagatttagaacagcaattaaagacccaatggatttagtatttctattttggtcattgggttcaggtatagttttaggagcaggtttgattcccttagctgtcatgggttcaataattatgggattgattctaatattcttttcaaataaaacaatatctgaaactccatatatattgatggtaaattgtaataatgaagattcagaagatatagcaactgataaaattaaaaaagtatttactaaatatcaaataaaatcaaaaagtgttacaccagaaaaaggaatagaattagtgtttgaagtaagaatgaaatatggagagacaagtcttataaatgacttgagtcaagtagatggagttactaatgcagttcttgtaagctataatggtgactatgtagcatagagaggagtaatcttttatgaaagataaaaaatttacccttcttatctctattatgattatatttttatgtgctgtagttggagtttatagtacatctagcaacaaaagtgttgatttatatagtgatgtatatattgaaaaatattttaacagagacaaggttatggaagttaatatagagatagatgaaagtgacttgaaggatatgaatgaaaatgctataaaagaagaatttaaggttgcaaaagtaactgtagatggagatacatatggaaacgtaggtataagaactaaaggaaattcaagtcttacatctgtagcaaatagtgatagtgatagatacagctataagattaattttgataagtataatactagtcaaagtatggaagggcttactcaattaaatcttaataactgttactctgacccatcttatatgagagagtttttaacatatagtatttgcgaggaaatgggattagcgactccagaatttgcatatgctaaagtctctataaatggcgaatatcatggtttgtatttggcagtagaaggattaaaagagtcttatcttgaaaataattttggtaatgtaactggagacttatataagtcagatgaaggaagctcgttgcaatataaaggagatgacccagaaagttactcaaacttaatcgttgaaagtgataaaaagacagctgattggtctaaaattacaaaactattaaaatctttggatacaggtgaagatattgaaaaatatcttgatgtagattctgtccttaaaaatatagcaataaatacagctttattaaaccttgatagctatcaaggcagttttgcccataactattatttatatgagcaagatggagtattttctatgttaccatgggattttaatatgtcatttggtggatttagtggttttggtggaggtagtcaatctatagcaattgatgaacctacgacaggtaatttagaagacagacctctcatatcctcgttattaaaaaatgagacacacaaaacaaaataccataaatatctggaagagatagtaacaaaatacctagattcagactatttagagaatatgacaacaaaattgcatgacatgatagcatcatatgtaaaagaagacccaacagcattttatacttatgaagaatttgaaaaaaatataacatcttcaattgaagattctagtgataataagggatttggtaataaagggtttgacaacaataactctaataacagtgattctaataataattctaatagtgaaaataagcgctctggaaatcaaagtgataaaaaagaagttaatgctgaattaacatcaagcgtagtcaaaactaatacagataatgaaactgaaaataaaactacaaatgatagcgaaagtaagaataatacagataaagataaaagtggaaatgataataatcaaaagctagaaggtcctaggggtaaaggaggtaagtcaataccaggggttttggaagttgcagaagatatgagtaaaactataaaatctcaattaagtggagaaacttcttcgacaaagcaaaactctggtgatgaaagttcaagtggaattaaaggtagtgaaaagtttgatgaggatatgagtggtatgccagaaccacctgagggaatggatggtaaaatgccaccaggaatgggtaatatggataagggagatatgaatggtaaaaatggcaatatgaatatggatagaaatcaagataatccaagagaagctggaggttttggcaatagaggaggaggctctgtgagtaaaacaacaacatacttcaaattaattttaggtggagcttcaatgataataatgtcgattatgttagtaggtgtatcaagggtaaagagaagaagatttataaagtcaaaataagattaaaattgaatataaataattttaatactgttaagtctaaatatttacttagcagtatttttttagaaaataatgtgtttgattaataatataaggtaataaattgataaaaattaaatacagcatattaataatacataataaagtaataaaaaaactgtttaagtataataacttatatttagacagtttttttcatttataaataatataaatgaaattgaaaacatttgaaggatagaaattggttggataaatgtataaattacttcaccaaaaaataatgacaagagttgtaactaagttgtaataaaatggtagttatttagcataaaataatgtatcatagaagtatattataaaattaataaaataagatttttgtaagaaaactgctggcttttgatatttagagtgagtagttaaattatgtttaggaggggtagaatttgttgcaaaaagtattatggaaatttttaaagctagtagtcggtttatttatatgttcagttggtatagtattgacgataaattgtaaccttggattatctccctgggatgtatttcatcaaggactttcaaatcatataggaataactataggaactgcttctataattgtaggctctatagtagttattgctgatgtcgttcttggagaaaatgtaggatggggaactgtttttaacatgctactaattggattctttatggatttacttttatatagtaatttaattccagaggctgatagtttatttgtaggaataattatgttgatattaggattggttcttttgtctgttggaatggtattttatatgggaagtggtttaggaagtggacctagagatggtttgatggttgcaattcaaaagaaaacaggaaaatcacttaaattaataagaggtactatagaagttggagcattaatagtaggatttttattaggtggaaaagttggtataggaactataataagtgcatttggattggggtatttcacacaaatggtatttggcttatttaaattagattgtagtaagattaaacatagatttatagtagatgatataaaatttatcaaagtgtatatgagtggtgagaaaaaagctgctgttcaaaatatagttaagtaatttaagaataaattcaacgaaatgttaagtattttaaattaacattttatttagatggataaattgaatattaaaagaatattaaaatatgaggattgctagaacactataaaatatagatttctagcaattttttatttgttcaatgtttttttagtactagaagtcttattctctatttaatgaatgaattaatttataattagagatactaaactttatagatattaatataaacacctttaaactgtgtattttccaaagcctttaaaatgcttgtatttattctaaataaaaaaataaaaaaatgtcaaaaaaactcttgtattatatccaaattttatatataattacctatgttgtttagaaattttaaactcaatgtttagtaaacaaaatgtttagtaaaataaaacagaaactaggaggtgcaacatggatataggtgaaaagataaaaagattaagaacagaaaaacaactgacccaggaagagctagctaatagatgtgaattgtcaaagggatttatttctcaattagaaaataacttaacatcaccatccatagctacccttatagatatacttgaaatactaggtacaaatttaagggaattttttaatgaaatagatgatgaaagaatcagttttacaaaagaagatatgtttgaaactgaagatgaagatttaaaatataaattaaagtggttaattccaaattcacaaaaaaatgaaatggagccaataataataacattgtatccaggaggacagtataaagaagaaaagccacatgaaggtgaagaatttggatatgtattagcaggttcaatatatgtccatataggcgaaaagaaaaataaagtaaaaaaaggagagagtttttactttagaccaaaagcaaatcactatatatcaaacgaaggcaaaactacagcaaaagtgatttgggtaagtacgccaccatcattttagaatagaggtgtttaataattggtagaaaatataatagaattaagggatatatctaaacattatgaggaacttactgttttagataatttcaatttagatataaagaaaaatgagtttttaacattacttggaccaagtggatgtggaaaaactacaacattaaaaataatagcaggatttgagtatgctgatgatggtaaagttttatttgaaggtaaggagataaataacttgccaccatatgaaagacaagtaaacacagtatttcaaaaatatgctttatttccacacatggatgtttatgaaaatgtagcttttggattaaaaattaaaaagactccaaaagatgtaatagatgctaaagtaaaagaggttttgaaacttgttgcactagaaggttttgaaagacgacaagttgaatcattgagtggaggacaacaacagagaattgcaatagcaagagctctagtcaatgaaccaaaggtattattactagatgaaccacttggagcacttgatttaaagttaagacaagagatgcaaatagaattaaagagaatccaaaaaaaattaggaataacatttgtttttgtaactcatgaccaagaagaggctcttactatgtcagatactattgttgtaatgtataagggcaaaattcaacaaatgggaacaccacaagatatatacaatgaacctaaaaattcatttgtagctaaatttataggtgaaagtaacatatttgatggaattatgatagaagattataaagttaatttctgtaatagagattttgagtgtgttgataaaggattcgaaaaaaatgaaaatatagaagtagtaataagaccagaagatataaaaatggtaaagccagaagaaggaatgttaaaggggaaagttacatctacagtgtttaaaggagtgcattacgagatagaattgaatgaaaatggaagattgtggatacttcataataccaaaaatgctgaggttgggactgaactaggcatggatatatatccagaagatatccatataatgagaaaagagaataactaagatgaaaagaaaatcttttttagcatatccatatgtagtttggagtgcgatatttgtaataattcctttaatattagtggtattttttagttttacaaaagaatcaggtggaggttatgcctttacacttgagaattataaagaagtaattgaccctatatatatgaaagtttttgggcgttctattcttttagcaggaggagctacattaatatgccttatagttggttatccagtggcatatataatttcaaaggctcgtgtaagtagaagaggttcattaatattattgtttattcttcctatgtggatgaactttcttttaagaacatatgcatgggttgctatattaggaaaaaatggacttttaaatacatttttaggttggtttggaatacaaccattagcaattttgtatactaattttgctatacttttaggtatggtgtataactttttaccatttatggttcttccaatatatacagcactatcaaagatggataatgatttgataaacgctgctcatgacttgggtgcaaataatatgacagtttttagaaaaattatatttcctttgagtttgccaggtgtaatgtctggaataactatggtatttatgccagcagtcactacttttgcaatatcaagactgttaggtggaggtaaaataatgctggttggagatttgattgaacaacagtttacagttgttggagattggaactttggttcagctatatcgatatttatgatgatagtaatattaatatctatgtctataatgtcaaaatttggagatgaatctgacaaagaaggcggtgggttactattttaaaattaaagaaaataacttctaatatatatttagcattagtattcttatttttgtatgcacccatatttgctttggtactattttctttcaatgattcaaaatcaatggcaagatggaatggatttacatggaagtggtatggtcaattacttcaaaatgagagtataatgagtgctttatattatactattgtaatagctatattagcgtctgtaatatctacaatagtaggaactataagtgctataggaatacataagatgagaggtaagagtaagaaattaatactaaatgtaaactatcttcctattttaaatacagagatagttacagcagtagctcttatgagcctgtttgtatttgtaaaaatggaatttggatttacaacaatgctattggcacatataatgttttgtttgccatacgttatactttcagttttgccaaaaatgaagcaattacctgataatatagaagatgcagctatggacttgggagcaacacctatatacgctcttagaaaagtaattttaccacaaataaaaccaggtatagtttctggatttttaattgcatttactatgtcaatagatgactttataataagtttctttaatgctggaaatggtgtaagcaatctttctatagaaatctatggaatggctagaagaggtataaaacctgaaataaatgcattatcaacaataatgtttgcagtggttctaggtttacttttactagctaataaaaaagaatctatagtaagggggattaaataatgattaagtttaaaaaaacaatatcccttatagctgtaggtatgatgacagttactttatttacaggatgtaataaagcaactgattctacaaaagttttaaatgtatataatgttggagattatatagatgagtctcttatagataagtttgaaaaagaaacaggaatagatgttcaatattcaacttatgatactaatgaaatgatgtatcaaaaagtaaagagtggtagtacacactatgatttagtatttccttcagactatatggtagagaaaatgaaaaatgaaggtcttttggaaaaattagattttaagaatatacctaatatgaaatatttagataagagttttttaaatcctgtatacgacaaaactaatgaatatagtgttgcatatatgtggggaactcttggaatattgtacaataagaaagaagttaaagaccctatggatagctggaatatactttggaatccaaagtataagggaaatataatgatgtttgactctgttagagatactatagggataactcttaaaaaattaggatatagcatgaatagtgtaaatccaaaagaaataaatgaagctaaaaatcttttaatgaaacaaaaggatttagtattggcttatgtaaatgatgaaggtaaggatagattgcttggtggagaagtggcaatgggtatgctgtattctggagatgcagttacgctaatggagcaaaatcctgaccttgattatgctatacctaaagagggaactaataaatgggtagatgctatgtgtgtacctacaacagcacaaaataagaaagaagctgagctgtttataaactttttattagacccagagaatgcaaaagtaaatgctgagtacattgggtattcaacacctaatacaggagcactaaaattattagacccagaaataactcagaatcctgttgcatatccatctaaagaagtacttgataaatgtgaaacttttgaagatattggtgaaaatataaaattatatgacaaggcttggatagagttaaaatcaaaatagggtcttgttggtttaagtaaatttacttaataaatacttaataaaactgttcttttttagaaaatttattttctaattattgaacagttttattttttgtttaggtcatgtttttattttgagtttatttttatgagaatttaaagtacagtaagtttcattgattactatttttataataataactataaagaggttgtctcgaaattgagataagcctctttttcattgttgaaatgatgaaaacatgtttgatttcataaaaaaagagtgattcatgagctaaagaatttgctttgagacagtattttttattaagttatattcatatgcaatttaaatagtttattaataaatgaaaacttatttgtataatgattttaataataattagaaaaaatgggcaacttaatagaataattggaggtgtaaatttataaaaaatgaataggataaataaaaaaatagatttattaatattggctttgctcgtttttatatttttaattgttggaatagtaatactatcgattaggacagaaaataaattgaatgtgttcataatgttagcaataattttttttataataatgttaacttatttatcaaattcagtagtggggttgataacaagttcaataattatatttatgtatacatcctatattttatataacaatattactcacaatatggatgttgaatttatatcatatatgtggataatagcaacaccagtatcttcaattataatgggtaatctgaacaaaagcataaatgaattgcaaaatacaaataaaaaactatctgaacagtataaggaattagtgactattgatagtgaaactggacttagaaatttaaagattttttataatgatgtaaatatggagataagtaaatctattagacataatactgatttttctcttatgatagtaaaattaccatactacggaaacctacagactatatttggtgaaaacaaaactaataaaatagtaaaatatattggttcaaatattatagaatgtacaagaaatgaagatataatttatagtttacaaaaagatatgatagggatactaatgccaaatacatctttggaaggttcgaaagttgttaaagacagaataaagaaaaggataaaagaattaaatttagatttaaacaataggggaaaatatgtaaatatagatgtcaaaattgcatttttacaatataagagtagttttggagatagtataaattttaagaatatagttgaagaggaacttcaatatgatgtttaaaatatttaataaaagtttattaaaattagtaattgtattatcaatagtactgacaatatcaaattttagcttattttcatatgcatcagaaattacttccagcacagataaggtattaatcatatatgattctaagaaagaaacagcttataatagagatattttaaatattatgagaactctattgggaagatttagttcagatatagagctattaaaattgagtaactatgatggtgagataaatgaaaattattacagtcatatatttattttaggaatcaatgaaaactcatataataatgataaaaacactaaaaacttgattagttccttaaattcatataaagtaactatatgttggttaggatatggtatagaaaatcttttggaacataaaaaatacaatttagactatgtaggaaaaacaaacaatatagttagtgtaaattatagaggtaaatcatataacttggatgaacattatgtttttaacattgtagaatcaaaagatacaagtaataaagtaataggaagtattaatgataccttaaataagtatccatatataataaatgataaaaatcttttttatgtatcaaaattagatttagatggagttttattttatatattttgcgattcacttaatgatatttttaatattaagacgtttgataaaggacgtatatttgtaagaatagaagatgtacatgcttttagagaaccaaaaaatcttgtagagatagcggattatttaagtagtaagaatataccatttacgattgcattaataccagcatatgtaaatcctaaaaatcataaagtaataactttatcagaaagccctgaaattgtcaaagcaataaaatatatgcaagataaaggtggaactgtgatattgcatggatatactcatcaatacaagaaagaagaagtttctggagaagggtatgaattttgggatggtaaaaaagatgaacccttaaaagaaaatatgaagatatttgtcaaagatagagttttgaatggtcttagagtatgtatagagaatggaatttatcctcttgcatttgaagcgccacattatgcaatggaatcagagggatataaagaattaaaaaaatatttttctacttatatggggcaacatcaaaataatgataaaaaatttagcacaaatacatatccttatattattagggatacagaggagtttaatatatttatacccgaaaatttaggatatatagacccagaagacaagtttacttttcaaaatataaaagaaaatttagataaattatctattgtaagaggttttagtggagggttcttctttcattcatatttaaacatagagtatctaaaaaacacaatagaatatttagaaaaacagaatatagaatttatgaatttaagagattttaataattgggtaaaagttgatgaaatacaaataagaaataatggagatgaaattatagtcaactatgataaggacttagatgaaataactaaaagtgatactagatttaaatacatatccaatattagtaaaattttaatattcatagtatctataagtgttttaatatttgtgattatatttatatattttaagagaatagataaaaagaaatttttaaaataaatgattttatattagaatcaatattttaaaatattttaggagaaatttatgagagatttaaatgtatcagagtatttgttcgtatttagtctgtttagtatatggtctttattgcttataaatattattttagctatgggtggatatatattttattttaaaaactttgataaagaaataaaagaaattgatgaatatcctatgatatcaatacttgttcctgctcataatgaagctaaagtgataggtagaactgtggagtctttgttattactcaattatcctaagagtaagatggaacttattgttataaatgacaattcttctgataatagtaaagaaattttagaaaatataaaggataggtacaacaattataatttcactataataaatacagatagtttaacaggtggaaaaggaaagtctaatgcattaaatattggatataaggtttcaaaaggagattttatagctgtttatgatgcagataacacaccagataaaaatgcacttagatatctagtacaaactatagtaatgaatgatgaattaggtgctgttattgggaaatttaggactcgaaataaaaataaaaacctattaaccaaatttataaacatagaaacattaagctttcaatggatgtcacaagctggtagatggcaactttttaatctatgtacaataccaggaactaactttatattgaggagaagtatcatagaagaaattgaaggatgggatagtaaagcaattgcagaagatacagaaataagttttaggatatataaattgggatacaagataaagcttgtaccacaatctataacatgggaacaagagccagaaactgttaaggtgtggataaagcaacgtactagatgggcaaaagggaatatatatgtattaatgaaatatataaaaaatatatttaaacagggaagaaataagattgtgtttgatatagcttactttttttctgtatattttctatttttaacaactgtaattatatccgatattttatgtgttttaagtatatctaaactagtagaaatttctattccaattaacttttttctaatatggatactatcttatcttttatttattatagaagtgagtataagccttactatagaaaaaggtgaagcaacaattgaaaatatattcatagttgcaataatgtattttacatactctcaactatggctgtttgtagctataaaagggatgatagagtatctaaaagatataatttttaaaagagaggttaaatggtataaaacagaaagattttgattcatgtacaggaggaattaacatgaaaaaatttattatatcaattatatctttagtattgtttttttcaaatatatcacttatatacaaagtaaatgctgatgagactaaagttaaaaattataagtttgaaagagatataactattgatggtgttataggaagtaatagtactttttttgaagtaaataaaaattgggatattgaagaagttttattgcatcttaattttagtaagagccaaatattaaatggagatgtttcaagtttaactgtattgataaataatgtaccaataaaatctattaaattaaatgctaagacaaattataaaaatacattagaagtattagttccaaaagattatataattcaaggatataatgaaataaaaataaaaacatacaaaacaatatctgataaaatttgccaagatgattccaatactgggaactggatggttattcacaaagaatcatatatatcaattagatataagcagaaaaaggtggaaaactcaataaatgaatatccgtatccatatgcagaaattgaaaataatcataaattagatacaactatagtagtaccagataatatgactagaggagagactacagcagtgtttaatttggcatcatcatttggaaaaataacaaaaaatgatgatttaaagttagatgttaaattatattcagaaatgaaaaattggtcagatgataatattatatatattggtaaacctgaaaatacagcagaagaaattttggatattttaagtataaaggaacaaaccctattatcttcaaactgtataatcaagcaagtagattcaccatacaataagaataagaagatgatggtggtaattggtagtaatgaagatgatttaataaaggcatcaaatttattaatagaaaatagactttctaaccaagttttatcatcatcagtgcttgtaaacaaagagactaatataaaaattaatagggaacaaaaattaaatttaggtcatttaacattaaaagacttaggatattctgactttttgttggaaggagcatttaatcaacaagctttgtttgatgtcaaaataccaacgggtaaggtattagatgatggttcaaagattatcttaaatttaagatattctgacaatttagattttgaaaaatctttagttacagtgtctataaatgatgttattgtgggaagtaaaaaattggataggtcacattctaataatgataagttagaattaaaaatacctaaagatatagataataaaaactattatcaagttaaattgacatttaatttgagtataaaaaattcgaattgtgttactagagagagtaataatccttgggcatatgtatcaaataattcttatttggcgttatctacgaaagaaaatgaaaccttatcttttgaaaattatccgtatccatttgttagagatgatgagtttaatgatttaactgtgataatgccagattattcagggtcacaagctatgacctggatgtttagattaggtgttactttaggtacgaatataaattcacataatggaaatataaatgtaattagaggaaaagaatttagtgacaagtataaggatactaatattgtagtttttggagtgccacataataattctgttataaagatgttaaataataatttaaatataaagttcgataaaaattactccaattttatatcaaatgataagataagctttattgatgattatggaaaaaatatttctaccattcaattaataaaatcaccatataataatcaaaaaaatatcatggtaattagttcaatgaatgaaaaaaacttatatttaggaatggattatttgttgaataaaagtaaagttaatgatttaaaaggagatacattgataattgatgaatacggagaggtagaagatttagcttataatttaaaacctaagaaagaagtaaaagattcaagctggaatatgagtataaataagacaactaaagtatttttaatgatttcttttattactataattgtagtcatgatattatcaatgctatatataaaaaaatataaaagaagataatatgataaatttattattttaaaagaggtatataatttgaggaaatatatgaataaatttaaattaaaaagaagcattttaatctcattaataatcttaatttttatatttatagtgtactttgtaagtattgagttaaaagatgggagtctagtaaataatcaatataaaggtaagattaaatcggccaatttatctgtagattatgaaataaatcaagttatgaaggatatagataaattgggattgaatacagtaaatgtacctataattataaatgtagagtccattaattctgatattatgtcaatagataataatagtaaagaaaaggcaattaagttaataaaaaaattaaataaaaaaggtatttcaacaatattagaggcatatccatgggttgaaaatggaaaattgtatgagactgactggaaccctataaataaaaaaagatttttttatacttggcaaaatgccatattaaatgaacttataattgatgtagcaaatccactggatgtaaatgttttaaatattggttctaattttgtacatttggaagaatatcaacaaaattggggtgaaataatagattttgtacaatccaaatttgatggtcttgtaacgtacagaactaattggtggtatacaaaaaaagatgattcaagtagtaagttgttttatgaacaaaaattgaacaataatttttttgataagttagattttatatctatagcagcatattttgagttaagtaataaacctgttaatacagtggatgaattaatttctgccttacactcatctactgtaaacaatagaggacaaaatataaaacaagaaatatataacctttataaagctcatagaaaacctatattttttggagaattaggtttttcaaatagagaaagtgcaagttctcagccgtggaatcatactccttcaaaagctgtaaatggcgaagaacaagcaaggtgttttgaggcatataagaaagtttttgaaaatgaagactggataaatggtttttctgtgttttgtgtaggtaaaatagatgacgaaaaaaatttttacccatcaaaagagagtataaaagttattaagtcttggtatgaataattttaaaagtgtagaatttatatagattaaatagatgattaggagagatataaatgaatgacatcaaggttatgactgtatttggaactagacctgaagctatcaaagtagcacctttaataaaggaacttgaaaaaagagagaatataaaaagtattgtttgcgttacagctcaacatagagaaatgcttgaccaagttatagaaaccttcaatataaatgtagactatgatttggatataatggaaaaaggacaaagcctgaatgatataacatgtaagattttaaataaacttcccttgattttaaacaaggaaaatccaaatataatattggtacatggagatacaaccacaactctagctacaagtttgactgcattttataataaagctcttgttggtcatatagaagctgggcttagaacctatgataaatattctccttttccagaggagttaaatagacaacttacaggtattattgctgatatgcactttgctcctactaatttggctagaaaaaacttgatttctgaaggaaaacctaataataatatatttgtaactggtaatactgctattgatgctttaaagatgacaataaaagaaaactataatcatcctataattgatgagattggtaacgataggatgattttgttaacctctcacagaagagaaaatttgggtaaacctatgaaaaatatattcagagctataaagcgaatagtagatgattttgaagatgtacagatagtatatcccatacatttaaatcctaaaatacgaactatagctgatgagatatttggaaaatttcctgaaaaaattcatattatagagcctttagatgtagctgattttcataactttttaaataaatcttatatgataatgactgatagtggaggaatacaggaagaagctccatcattaggtaagccagtccttgtgttgcgtgataaaacagaaagaacagaaggaattgaagcaaagacacttaaattagtaggtactaatgaagatagaatatataattcagtgagcgatttattaataaataaagatagctatgttcagatgagtaaagcatctaatccatatggagatggaaatgcaagcaaatatatagtggatataataattaaaaaatttaattgcaaatatttaaattagataaggtctaaaacattaactaattgatataagatttatgataatattaaggaatacaatttttaagggggagtaatatggctagaaaattaataaaaaatttaggtaaaagtaaaagtgtaaagagagtgaaacttttatttaagaagatttttattactgtattcatagtagcaagtatagttgctatttttaatataacgaaatattttgaggaattatacaaagtaagggatttaaaaagtactaaaattgaatactatatggatgtggctgatgaagcaggagatggaaaggtccaattaagttggaaggccttacttgctatagacatggtaatacatgatgaagatttaagtaatataaaaaagaaagacacattggatataggggaaaagtttatagtagaagataaaaatgataaaggcgaaaaggtgtataaggtaaaaaagtttaataaggtattaagcgaattgaaatttgactcttctcaaaaaagtagagcaagaaaatacatgaaagatttggaatacacataccttggaaataaacaattagatagtagtgatgaaaaaattaaatttataaagaagttagaagactcagctataagagaatatattgattatggaatattgccctctgtaacaattggacaagctatattagaatctggctggggaaattctaaacttacaaaacagagtaataatttatttggtataaaagcagataaagcatggaaaggaaaaagtgtagaaatttcaacttcagagcattataatgaaaaaattgtagctagttttaggtcgtataattcattacaagattctgtcaaagaccacagtttatttttaattaataataaaagatatagaaaacatgggttgtttgaggcaaaagattatattagtcaagctcaagcattagaaaatgcaggatatagtacagcagaagataaaaaaggaaatcgtatatatgcagagctattaatagatattattaggagttataatttgcaattgatagacaataaagttgagacaaaataattgttaactttatatgaggagataacaagataagattcttttctacaaaaagaatagaaaaattgtaaaaaaaactaaaaaaatgtattgacttgttatttaaaaggtgatattattattactgtactcgaaagagaacaaaatgaactttgaaaattaaacagtaggttaatttataaacaagaaacaaaccataaagccagatattttgataacaatagtatctgagcctgataaacttttatttgagagtttgatcctggctcaggatgaacgctggcggcgtgcctaacacatgcaagttgagcgatttacttcggtaaagagcggcggacgggtgagtaacgcgtgggtaacctaccctgtacacacggataacataccgaaaggtatgctaatacgggataatatatttgagaggcatctcttgaatatcaaaggtgagccagtacaggatggacccgcgtctgattagctagttggtaaggtaacggcttaccaaggcgacgatcagtagccgacctgagagggtgatcggccacattggaactgagacacggtccaaactcctacgggaggcagcagtggggaatattgcacaatgggcgaaagcctgatgcagcaacgccgcgtgagtgatgaaggccttcgggtcgtaaaactctgtcctcaaggaagataatgacggtacttgaggaggaagccccggctaactacgtgccagcagccgcggtaatacgtagggggctagcgttatccggatttactgggcgtaaagggtgcgtaggcggtctttcaagtcaggagtgaaaggctacggctcaaccgtagtaagctcttgaaactgggagacttgagtgcaggagaggagagtggaattcctagtgtagcggtgaaatgcgtagatattaggaggaacaccagttgcgaaggcggctctctggactgtaactgacgctgaggcacgaaagcgtggggagcaaacaggattagataccctggtagtccacgctgtaaacgatgagtactaggtgtcgggggttacccccttcggtgccgcagctaacgcattaagtactccgcctgggaagtacgctcgcaagagtgaaactcaaaggaattgacggggacccgcacaagtagcggagcatgtggtttaattcgaagcaacgcgaagaaccttacctaagcttgacatcccaatgacatctccttaatcggagagttcccttcggggacattggtgacaggtggtgcatggttgtcgtcagctcgtgtcgtgagatgttgggttaagtcccgcaacgagcgcaacccttgtctttagttgccatcattaagttgggcactctagagagactgccagggataacctggaggaaggtggggatgacgtcaaatcatcatgccccttatgcttagggctacacacgtgctacaatgggtagtacagagggttgccaagccgtaaggtggagctaatcccttaaagctactctcagttcggattgtaggctgaaactcgcctacatgaagctggagttactagtaatcgcagatcagaatgctgcggtgaatgcgttcccgggtcttgtacacaccgcccgtcacaccacgggagttggagacgcccgaagccgattatctaaccttttggaagaagtcgtcgaaggtggaatcaataactggggtgaagtcgtaacaaggtagccgtatcggaaggtgcggctggatcacctcctttctaaggagaattacctactgtttaattttgagggttcgtttttacgaatactcaaaattagcactttaagcaacagaataaactgaacgcatgtgaagtttgtttgttggcgctgtgcgttagcactttaagcaacgggatttatccgttggcgctgtgcgttagcactttaagcaacggaatttattcgttggcgacgtgctttagcactttgaaaactgcatatatatttagtgatatgacatctaatttgtaatatataaagctgataacttttaaaaattatcaagttgatagactttaatctatcaaacctttttaactggtcaagttattaagggtgcagggcggatgccttggcactaggagccgatgaaggacgtgataagctgcgataagcttcggggagttgcacgtaaactttgatccgaagatttccgaatgaggaaactcacttagagtaatgtctaagtatcattaagtgaatacatagcttaatgaggggaactcagggaactgaaacatctaagtacctgaaggaagagaaagaaattcgattccgtaagtagcggcgagcgaacgcggattagcccaaaccaataaagttttctttattggggttgcggacatatcataacgaagaggtatcgtaattgaagaggtttggaaagacccaccacagaaggtaatagtcctgtatgttaaacgagaagacttcagatatgatccagagtaccacgggacacgtgaaaccctgtgggaagcaggagggaccaccctccaaggctaaatactacctagtgaccgatagcgtatagtaccgtgagggaaaggtgaaaagaaccccgggaggggagtgaaatagaacctgaaaccctgcacttacaagctgtggaagcacatttcttgtgtgaccgcgtactttttgtagaacgggccaacgagttacgttaagtagcaaggttaagcacttaaggtgcggagccgtagcgaaagcgagttttaactgagcgttcagttacttgacgtagacccgaaaccgggcgacctacccatgagcaggatgaagcgaaagtaaaatttcgtggaggtccgaacccacgagcgttgaaaagctcggggatgacttgtgggtagcggtgaaattccaatcgagcccggagatagctggttctccccgaaatagctttagggctagcctcaaggtgagagatacggaggtagagcactgaatgtcctagggggtattgcacctaccgaagactatcaaactccgaatgccgtcatcttatacttgggagtcagactgtgggtgataagattcatagtcgaaagggcaacagcccagatcgtcagctaaggtccctaaatgtaagttaagtggtaaaggatgtgggattgcacagacaaccaggatgttggcttagaagcagccactcattcaaagagtgcgtaatagctcactggtcgagtgatcctgcgccgaagatttccggggctaaaacttactaccgaagctacggcatcagtaatgatgggtaggggagcttcccatacgggttgaagcatgaccgtaaggacatgtggacagtatgggagtgagaatgttggcatgagtagcgagatgtgggtgagaatcccacaggccgtaaacccaaggtttccaggggaaggttcgtccgccctgggttagtcgggacctaagctgaggccgaaaggcgtaggtgatggacaacaggttgatattcctgtactaccgataaccgtttgagagaagggatgacacagtaggataagctaagcacactgttggttatgtgtgcccaagcattgaggcagtcaaagtaggcaaatccgctttgataatgctgggatgtgatggggagcgaaatttagtagcgaagtagctgatttcacactgtcaagaaaagtctctatcgaggttaaaggtacccgtaccgcaaaccgacacaggtgggtgaggagagtatcctaaggccagcgagagaactgttgttaaggaactcggcaaaatgaccccgtaacttagggataaggggtgccaccatcaggtggccgcagagaataggcccaagcgactgtttaccaaaaacataggtttctgctaagtcgcaagacgatgtataggagctgacgcctgcccggtgctggaaggttaaggggatctgttagagcaatcgaagcagtgaacttaagccccagtaaacggcggccgtaactataacggtcctaaggtagcgaaattccttgtcgggtaagttccgacccgcacgaaaggcgtaacgatttgggcactgtctcaacaacagactcggtgaaattgtaattccggtgaagatgccggatacctgcgacaggacggaaagaccccatggagctttactgtagcttgacattgggtcttggtactacatgtacaggataggtgggaggctttgaaaccaggacgccagttttggcggagccatccttgggataccacccttgtagtactgggactctaaccataggccatgaatctggtcttgggacactgtcaggtgggcagtttgactggggcggtcgcctcccaaaaggtaacggaggcgctcaaaggttctctcagtacggtcggaaatcgtacgtagagtgtaaaggcaaaagagagcttgattgcaagacatacaggtcgagcaaggatgaaaatcggacttagtgatccggtggttctgcgtggaagggccatcgctcaacggataaaagctaccctggggataacaggcttatctcccccaagagtccacatcgacggggaggtttggcacctcgatgtcggctcatcacatcctggggctgtagtaggtcccaagggttgggctgttcgcccattaaagtggtacgcgagctgggttcagaacgtcgtgagacagttcggtccctatccgtcgcaggcgtaggaaatttgagaagacctgtccttagtacgagaggaccgggatggacgtacctctggtgtaccagttgtcctgccaagggcatggctgggtagctatgtacggaatggataagcgctgaaagcatctaagcgcgaagccaacttcaagataagatttcccaccgcaagggtaagaccccagaaagactatctggttgataggtcgaaggtgtaagtgcagcaatgtatttagcttatcgatactaataggtcgaggacttgaccaatatttatttgatgttcattcattaggatatatatgtagtttttagggtgctaactctaaaaaattagttttactaatttataaaaatttaatgcgggtgtagctcaatggtagagttctggccttccaagccagctgtgagggttcgatccccttcacccgctccaaaagattatgtggttacaatagcagagaggatacacctgttcccattccgaacacagaagttaagctctctagtgctgatggtacttggtgggaaactgcctgggagagtaggacgtagccacgtaatctttttttgttgtattaaatttaataaacctacaattgttatatgtttttatttgtcttttatagatttttttggcaataaatgatatagtgaagataattaaatatattcaatatatttaatttttttattttttgtttttataatttttttagaagtttattttttatgtaattatttataattttgggtaaaaacactttgatataatttcaaaaattaaaaggttaaaaaacaaagtagaaatttatgttaaataaggagattaatatgagaagaaatacaaaattattaacaacagggattctttcaatggcaatcgtcgcacctacaatggcatttgctactgaatctaatgctatggaaaataacgctgatttaaatataaacttagagaaaaaaagtatcgttttaggtagcaaatcaaaagtcagtgtcaagtttaaagaaaaaccagatgcagatagcattacattaaagtataaatgctatgatatgccattggatacaactctaaattataatcaatcaactgagtcatatgaaggaactatcaattataataaagacccagaatatttaaatgtttgggaactacaagggataacaataaacagcaaaaataatcctaaaactttaaacaaacaagaactagaaaagatgggattaaatttaaaagactataatgtaacgcaggaatgtataattgaagatataacttctagaaaagatgtaaataaatatttaagaaaaacttctgcacctattacagaacttacaggaagtgatagatacgaaacagcagttaaaataagtaaagaaggctggaaaaatggttcagataaggtagttataataaatggggatgtaagtatagatggcattatatcaactccactagcaactacatataatgctccaatacttttggttgaaaaaaataatgtacctaatagtgtaaaatcagaattaaagcgtttaaatcctagagatgtaattataattggagatgagaatgctatttctaaaactactgctaatcaaattaaatcgactgtaaatgctagtcaaacacgtctaaagggctctaatagatatgagacatctttattgatagcaaaggaaatagataaaaatcatgatgtggaaaaagtatacataacaaatgctaatggcggagaagtggatgcacttactatagcagcaaaagcaggtcaagacaagcaaccaattatattaactgataaaaatagtattacagacaacacatataaatggttaaagagtgaggatttacaaaatgcttattttataggtggacctcaaatgatatcaacaaatgttataaataaggtaaatgatataactaaagataatgttactaataatagagtatatggagcagatagacacgaaacaaatgcaaacgtaataaaaaaattctatacagatgatgagttagaggctgttttagtagctaaatcagatgtacttgttgatgctttagcagcaggtccattggctgcgaacttaaaatctccaatacttataacaccaaagacgtatgtatctgcataccataaagataatttagaagctaaatcagctaataaagtatataaaataggaggaggattgacttctaaggtaatgaactctatagcatcatcattatctaaacacaatacaactccaacagaaccaggaaatagtgggggtaagacagttatgattgacccaggacatggtggttcggacactggaacaacaggtaaaccattagggggtattaaagaaaaagactatacattaaatacttcacttgcgacaactgaatatttacgttcaaagggattcaatgtaataatgacaagagacacagataagactttatctcttggaaatagaactgctttatctaactctttgagaccagatttatttacgagtatacactataatgcatctgatacaactgggaatggtgtagaagtattttataagcttaaagataaagatggagggactactaaaactgtagctacaaatatattaaatagaatcttagagaaatttaatctaaaaaatagaggtgcaaaaacaagaacactatcaactgaccctacaaaagattatttatatgttttaagaaataatgatatgccagctgtacttgtagaatgtgcatttttggataatgagaaagatatgagtttacttaatacatcaaataaagtaaaagaaatgggtacacaaataggtaaaggcatagaagattcattaaaatagtctacaatgagagcatagaaaaatttaaaataaattaatctgcaattttaaatttaaactaaagctataagataagaatgtaattataatagtaataaagactgtatatacattgtgcatataagtgcgaaatgaggtatatacagtctttttatgattaattgtaaaaggatttatattatatgaagaatttacatatcttaaggctacagttaattgtcaagagttggagtattcatttgtaatacacaataaaagcttaattactatattttattgtgtgtttgtgtgtttgtgtgttttttgtggatttttatgtcaataaatgatatagtatagataattaaatgtattaaatatatttaatttttttattttttgagttttataagtttatttttatatattacttatatattatttatattttgggttagatacactttgacatattttcaaaagttaaaagattaaaaataaagtagaaatttatgttaagtaaggagattaatatgagaagaaatacaaaattattaacaacagggattctttcaatggcaatcgtcgcacctacaatggcatttgctactgaatctaatgctatggaaaataacgctgatttaaatataaacttagagaaaaaaagtatcgttttaggtagcaaatcaaaagttagtgtcaaatttaaagaaaaaccagatgcagatagcattacattaaagtataaatgctatgacatgccattggatacaactctaaattacaatcaatcaactggggcatatgaaggaactatcaattataaccaagacccagaatatctaaatgtttgggaactacaagggataacaataaacagcaaaaataatcctaaaactttaaacggacaagacctagaaaagatgggattaaatttaaaagactataatgtaacacaggaatgtataattgaagacataacttctagaaaagatgtaaataaatatttgagaaaaacttctgcacctattacagaacttacaggaagtgatagatatgaaacagcagttaaaataagtaaagagggctggaaaaatggttcagataaagtagttataataaatggagatgtaagtatagatggcattatatcaactccgctggcaaccacatataatgctccaatacttttggttgaaaaaaacaatgtgcctaatagtgtaaaatcagaattaaagcgcctaaaccctaaagatataattataattggagatgagaatgctatttctaaaactactgctaatcaaattaaatcgactgtaaatgctagtcaaacacgtttaaatggttctaatagatatgagacatctttattgatagcaaaggaaatagataaaaatcatgatgtggaaaaagtatacataacaaatgctaatggcggagaagtggatgcacttactatagcagcaaaagcaggtcaagacaagcaaccaattatattaactgataaagatagtattacagacaatacatataaatggttaaagagtgaggatttacaaaatgcttattttataggtggtcctcaaatgatatcaacaaatgttataaataaggtaaatggaataactaaggatagtgttactaataatagagtatacggagcagatagacacgaaacaaatgcaaatgtaataaaaaaattctatacagaggatgagatagaggctgttttagtagctaaatcagatgtacttgttgatgctttagcagcaggtccattggctgcgaacttaaaatctccaatacttataacaccaaagacgtatgtatctgcataccataaagataatttagaagctaaatcagctaataaagtatacaaaataggtggaggattgacttctaaggtaatgagctctatagcatcatcattatctaaacacaatacgactccaacagaaccaggaaatagtgggggcaagacagttatgattgacccagggcatggtggttcagcacctggaaattcatctggaggaatgattgaaaaagattacaatttaaatacttcacttgcaacaactgaatatttacgttcaaagggattcaatgtaataatgacaagagacacagataagactttatctcttggaaatagaactgctctatctaattcattgaaaccagatttatttacaagtatacattataatggctcaactaataaacaaggtcatggtgtagaagtattttataagcttaaagataaaaatggggggactactaaaactgtagctaccaatatattaaatagaattttagagaaatttaaacttacaaatagaggtataaaaacaagagtacttcctagtgattctacaaaagattatttatacgttttaagaagtaatgatatgccagctgtacttgtagaatgtgcatttttggataatgaaaatgatatgagtttaataaactcatctgcaaaagtaaaagaaatgggtacacaaataggtaaaggaatagaagattcattaaaataaatggaaataaaaatatttaaaaacttaatgtaaatttatactaaagtcaaaaaatgaaatataagtgtatcaatagtaagactgtatgtacatttgcacatgtgaatgcaagtatatatacagtctttttttgtagttaaatgcaataatttgattgtgttttgtaaaatacacaatatgatataattagataatatacacttaatttaattgaggaaggtgattatatggaatatttatttgaaaaaagtagtttaaaagaatatggaaatgaagctttagataaatatagagaattattagataaaactgataataattcaaggtgtattcttttattagtaccaaacaataacacaaagatacgatatgaaagggctctaagattaaattatagtgaagaactgaaaataacaacatatataagttttgtgaagaaagaattagttaaatactggccactaataatagaaaaatgtgatgaaataaatacaaaggttgtatctccaacatttatatcaaatagtttaagtgaatatttaatagtgcaaaaagttaaggaaaaaaggatacaagaaggatattttgaagatattacaggaaccaataaatccatagcaaatagtataatgactaacataaataaatctgcatttaatttaattgattttgattttattggagaaaaaatatattcatcaaagaaaaataaagatagtatatatagattttcatacactcagatggatgaaattatatcatattatataaattcgttactatcaaattcaattttagataatgcattaagcatatatttatacaatcaatacctacttaatgatgatttttatttaaaaaacttatttacagaagtgagatatataattgtggatagtcttgaaagctcaagtaatgcagaagttgattttataacagaagcattggataatacattacaaagttatatatattttgattatagtagggattattctgtatttaataatgtggatatagactatataaatgagaaaataatatcaaaaattaagcctaaagaagaaaatattaaaaagaaggagattagaatagaagatttatacttattacctgcaaatatagaattaaatcaatcaagtcaattatacaatgaaatgttagatttaataagtgaaaaagttatatctcttatagaagaaaatgtatctccaagagatatagcaattatatctcctataaacaatagtatattggagcatcaaattagagattctttgatagaaaaaaatatagatgtttttagtactaagaaggataaaaaagctgtagattatccatatgggaatgcattggtagtggctacatgtatattttatggatatttagattttataaaagatgatgaatacttaagctttttagaaactcttttagaaataaataggataaaagcatttaagatttttaatgaaacaagacatttaagtattgataatatagatgaacatagtcagtatcgtgatattttacagtatattgaagaaaaaaagaagagtgatataaaaatacatgaatttttaactcaattttacatagataaaatgttaaatttaaaagaaggtaaaaagaatgttgggttatgtaaaaagataatagctgaaagtgagtcttttagtgaaagtttaagtctacttaggatgaaaaaagaaaagatatttatagaagctttaaaaagtacaataaacgattattactctgttgtcgatatagaagagttgaaatccaaagacaaaatagtaataactactccttattcatatatatcatcaaatatagatagaagtatacaaatatgggtagatataggaagtaatgcttggaatatgaaaatagaaaaagatataagtaatttaattgtacttagaaaatcttttgaagaaaaaaagatttatacaaatgaaatggaagaatattataaaaaatattatctatacaatacagtatataatttgttattaaatgcaaagaaaatctatgcatttaaaagtgaatatgcgattaatggttatatccaagagagtatattatatagtatacttttaaaaatctcacataaaggagataaaaattatgattaatataaattatagagaagaccagataccaataataaattacgataatggtactatggcagtaccagcagtaccaggtgctggaaaaacatttataataacaaatttagtagctaaactattacttgaacagaaacataagggtggtaaaatattaattcttacatatatgaatagtgctgtaaataattttaaaggtagaataagaaagattcttgaagagaataaaatagatgatactaattcgtatgaagtaatgactatacacagtttggctgtaaaaataataaaggaaaagccagaagttgtaatgttaagtgaggattttaacatagctgacgatttgcaaaaaagtattatattaaatgaatgtataagtagatttagatttgaaggtggagaaagagcttttagatggtttttaaaggagcaaaaagatgaacgctggaaagaaatagctcttgaagcctgggaaagaggtttttttgaatttgcaggaaatgcaataagtgaacttaagtataagggaatttctccagataaacttgaagaaatattgtcaagaggacacaaaggaatgcttaaaattattttaccaatatataaattgtatgatagaaaattaaagcaaaatggattgctagattatgatgatatattaattttagcagaaaaaactttaagcttagacgaagggcttagaaagaagtttcaaactagatacaaatatatatttgaagatgagtgtcaggactcaaatgaaattcaaggtaatataataaaaattatatctagtgaaaataaaaacctagttagagttggagatataaatcagagtataacaggaacattttcatcatcagaccctaaattttttaaagaatttataaatagtgcagatttctgttataggatggatatgtcaaatcgaagttcaaaagatatacttgatttagcaaacactcttgtcaagtatgttacaaaggaatttagacaagaagaatgtagacatgctcttgaagatatgcaaataaaaactgtgccaaatggaatgggatataaagaaaatcctaatccagaacattataatataaatgtaaagtggtatgagagttggaaaattgaaatagagcaaactgctagatacgttaagggtataaaaaataaatatccagataaaagtataggtatattggttccatttaatgaacaagtgacacaagttgctaaagaacttagagagaataatctaacctttgaagaattaggaccaaattctttgaataaaaggaaggttataaacaacatagcatatattattgattttatgttacattgtgatgatgtagaaaagttaatagttgtacttaataaagtttttatagatactgataatgaagaagaaataaagtattttttagaagaattaaaaaactattctaccgaagaaattatttataattttgaatttagtaagttagataatgatttaatagaatttaaagaagaaagtgacatatatttaagttttaaaagaggaatagatattataaaacagatattagaatatccaataataaggttagacctcttagttttgtttattgggaaaaaacttaatttagaaaaagaagataaagctgtactggattatatatctttttatataaagtatctaatatcagaaaatataaatatggatttagaagatgtatataatttattgtttgatgtaaagaatagggtgtttaatcatataatagatgtggtatatgagataaatggatatgaaccagagcccggtagtataacactatgtaactatcataagtcaaaggggatggaatgggattgtgtgtttttactaggtcttgttgaatataatttccctgacaatattaatcaaaagtttcagagtgataaatggtatctaaaagaaaaatataaaaaccctatggcaattattaaatcagaagttgaagctatattaaaaggaagtatttcaacagattatgctcataaaacgaagattgattctataaatgaaaagattagacttttatatgtagggattactagagcaaaggaaatgttagtactttcaggaagtgcttatagagatgaaagtgatatagggaataagagaaaagagcaaaaaccatgtatatatttaagcagacttaatcaacatattattgaaaaaaggtcaaattaatatataataagttattaaaagattgcttgaaatatatctaaaaggggataaaacaatatgtacagtaagtaactactaaaaaataaagttaagagagaagtgatatgagtgaacgataaattaaaatatttttcttatagtcaaaattcaatcaacacatataaatcatgtccattgaaatttaaatataaatatattgatagaataaattggaaaaatgatgatgttggtagtagagagtattatgaaactttaaaaacaggaagagattttcatttgatttgtgaaagatattttagcaatatacctcttggaatctattttaatgaggatgataaaaatagtaaaaagtttttaaagtggatggaaaatataaaaaaagttgttcctattgaaaaaggaaaaacgtatttgccagaatatgaagtaaggatgaccttaaatggggatataatacaggcaaagtatgatttagttgtaattggaaataacaatatagaaatatgggattggaaaaccgagtctaaaaagattgactataaacacgtagaaaatagaatacaaactattgtttatatgtttttagcaaaagaagtaatacctaaagttttaaaaatggacataaatgttaaagatataaatatgagatattatcaacctgaatttgatgacttaccaattaccattttatatgatgaagaaaaacatgaagcaaatagaaataaaattcaaaattatataagtatgataaaaaacactaattatgaagaacatacatacgaagacaatctatacaatgatatagaaaaggtatataataaagaagaacgtatgtgctatagaaataaaaagcattgcaagtattgtgaatttaataagttatgtaatggcaaagaaatagattatagtattttggaggcggaaatttatgggacttaggtttgtattaggtagaagtggaagtggaaaatccacctatatactagatgagattaaaaaagaagctcaaaaaaatgaaacgacatcaattatacttttagttccagaacagtacacatttgaggctgaaaatagagtaagtaagctattcttaggaaaagaaaaagataagtatctaagagttagggtacttagctttaagacactaagtaatatagttttttctcaagtaggaggattgacagatgtaaatataaattctagtggaaaagcaatgatggtatatagagctattgaagatgtaagtgaagaattaaatgtgttttcaaaatcaaaatcgcagtctggttttgtaagctcaattacagatatgatatcagaaatgaaacaatacaatataagccctgaaatgttagaaaatatatctggagaattggataatgaaactttaagtttaaaattaaaagatataagtaaaatatataattcttttgaagggaaattgcatgaaaattatgtagatgctcaagatatgttaacttcattggcaagtaaaattgaattaagcagttatttagatggagcttgtgtttatatagatgaatttacaggttttacaccaaatcagtacaatgtcataaagagtatattaaataagtctaaaagtgttaatatctctttgactgtagatgatatcaactatattgggtacagtaaatctgatatgttttctagaacgaaatttacttattcaaaattgactcaattgtgcaacgaagaaggcataaaaatattgccacaagtaaatttaaacacaggtgttataaaaagatttgaaaaagttaaggaattacagcacctagaaagattttataatgcttatccatataaaatatattcaaatccaactgaaaatataaagataaaagagtttaacaatttatattcagaggtggaagagatagccagagaaattgtacatttagttagagataagaatgtaagatatagagatataaccattgctacaagagatttaaatagatatgattttttagtacactctatatttaatgaatataatataccaaactttatagataagaagagagaggcaaaaagtaatccaatagttattttaattatttcagctttagaaatgaagaatagacgatatgggtatgaaactatgtttaggtatttaaaaagtggacttataggaattgataatgatgatataaatttactagaaaattatgtgttggctaatgggattaaaggtaaaaaatggtttgatgaaaaatgggattatagaataacacaaagtctttcaggtcaagaaagtgaatttgaactggaattaaaagaaaaaataaatgaaataaaaaatagagtattagagcctatagtaattttacaagaaaaattaagaggaaaaaatagagtaaaagaaatctgtagatatatatatgaatttttattagatataaatatgccagaaactatagaaaatttaatagtaaattttaaggataaaggggaacttgatgttgcaaatcaatactcacaagtttgggacatagtagtggacatattagaccaaatggtggaacttatgggtgatgaaataatttctttagaaaaatttataaaattaataaccttaggctttgatgaatatgaattaggactggttcctcctagtatagaccaggtacttgtaagtagtgtggatagaatgaaaaatccagacacgaaatatttatacctagttggaactactgatggtgtgtttccactgattacaaaggatagtggaatattgagtgataatgatagggaaagtcttggaaacaaaggaatcgaagttgatattgatagtaagactaggagttttgaagaacagtttcttgtatataaagctcttacttcgacatctaagaatttaaccataacatatccaatatcagaccatgaaggtaaaacgcttagaccatcaataattatatcaagacttaagaagatatttccaaatatagaaaataaaagttatttagtggaagaaaataaaagcactgataaagatatacttaaaaaaataacggttaaatcccctacatttaatgaacttataaacgtaataaaaaattatgacagtgatgattacaatacagaagagattaatagtatttggttagatatatataggtactatttaaaagatgaaatctatagttctataacaaaaaaagttataaaaggtcttagttatactaatcaagttcataagattgaagagaaaaaaataaggtcattgtataaaagtaattctcttagcatatctaggcttgaaaaatatgctgaatgtccatttgcttattttatacaatatggtctaaaagcaaaaaagcgtaaagagtattcatttacaccaccagatttaggaacttttattcataatattttagataggttttcaaaagaacttttacaagataatttaacttggagagatattgatgaaaaatatatagaattaaagataggtataatagttgatgaaataattttaaagataccaggatatatattaaatagttctgagaggtataaataccttgcatatagattaaagaatatgttgacaactgctataactataattagtcagcaaataaaacaaggttcatttgaaccaatagattatgaagttaaatttggcgacaatggaaaatatccacctataaaaatggtgttagaaaatggacaagaagtaagtttaattggacaaatagatagagttgatgaatttgaagaaggagaaaataaatatataagaataatagattataagtcaggcaataagtccataagtctaacagaaatatattatggtctacaattacaattacttgtgtatttagatgcaatccttgaaagtgcaaaggatgaagatataaatataaatccagctgcaatactatattgtagaataaataatccaatagcaaaatttaatgaagataaagatgatgaagaaatacaagaagcaatattaaaagaacttagaatgaaggggcttgtagtaaaagactctcacatagttaaagagatggataaatcattaatagatggagaaaggaaaaactctttagtaataccagtaggtcttactaaggatggaaatgtaggtaaaagtacttcagcaataagctatgaggatttcaaactgcttagaaaatatgtaaggcatgctataaaggatttatgtgaagaaatgttaagtggagaaatacgtatagctccatataaacataaagatggaacatcatgtgacttttgtgattactctactatatgtcagtttgattcaactataaaagataacaagtataaaaatttaaataataagagtaatgaagagataataaaaatgatgaaaggagatgttaattagtgagttctcctaaatggacaaaagagcaattagaagttataggaagtagagaatgcaatttattggttgctgctgctgctggttcaggaaaaacagccgttctagttgagcgtataattcaaatgataacaagtagagaaaatccaattgatatagataagttattagttgttacatttactaatgctgctgcgtcagaaatgagagagaggataggggatgctataggaaaagccttagatgaaaacccagaaaataaacatttacaaaaccaacttgttttattaaataaatctagtattacaacaatacactcattctgtttggatgttataaaatcaaactttcatagaataaacttagaccctaatttcagaataggagaccaaactgaatgtgctattttgaaacaagaagcaatagaggaagtatttgaagatttatatgaagaaagagatgaggggtttttaaatttagttgaaagttatgcagaaagaggaggagataaagaagtacaagatattatcttgggaatatattcatttgcaatggcttctcctgaacctaaaaaatggttgattgactcagcagaacgatttaatattgatgaaaattttgatttttcacagtctatttgggctagagctatattagacactgtaaaaatagaaattaatggtctttgtctaaatatggaaagggcattaaaagaagtggaatcaatagaagaattagaaacttttgcagaaaagttatccgttgaatataaaaaaattgctaacatttcacaagcatgtaataaatcttgggatgaggcatataaaaagatggcaagtatgtcctttgaaaattatgtaaaaggagtaaaaagaatttcaaaagatgctccttcgtatataaaagaatcaaaagaaaaggcaaaaactataagagataagactaagaagtctttagaaagtatagtaagtgctacattcaataaagataatgattctattagagaagaaataaaatatctttataacatagttaaaccaatatctagtgttgtactgagatttgaagaggaatatagcaataagaaaagagaaaaaggaataatagattttaacgatatagagcattttgcattaaatatacttacagatatagatgaaaaaggtaatattgtaccttctgatatagccgttggatatagaaacaagttttatgaaatatttatagatgaatatcaggatagtaatctagtgcaggaagtactgcttaaagctgttgcaaatacagaaactccaaatagatttatggttggtgatgtaaaacagagtatatatagatttagacaagcaaagccagaattatttttgcaaaaatataataactataatgataaaaagggaagttcccatagaaaaataatgctttacaaaaattttagaagtagagaagaagttgtagatgctgtaaattatatatttgaaaatataatgaatgagaatataggagaaattgaatatacagaaaaagaaagactaaatttaggtgcgaattttaatgtggatacagacgagaaatctattattggtggagcaacggagatacacctaatacaaaaagataataaacttgatgatgatattataaatgataaagacgatagaattaataacaaagaaaatgaaatagaggaagaagaaaaattagataatatacaacttgaggctagaatggttggaaacattatcaaagatttaatgaaagtcaatgaagatggaaaaattcaaaaggtctatgataagggaatagatggatatagacctgtggaatttagagatatagttattcttttaagagctacatctgcatgggctccagtgtttgcagatgaattgatgaatatggatataccaacatatgctgatgttggagtggggtattttgatacgattgaaataaaaacaatattgtcattacttcaaataatagataatccaatgcaagatatacctcttatatctgtattaaaatcacctatatttggatttacaccagaggatttgattgatattagagttcagagtaaagataaaattttttatgaggttttaaaaagtacagcagagtatgatggatttacagattctcaaaatgaaactgagtctgagtttataccaagtgaagagtgcataaacaaaagtaaagattttttaattaagctaaaggaatttaaagaaaagtcaatgtacatgagtacagatgaatttatatggtacttgtacacaaggactggatactatgcttatgttggagcattgccaggtggaagtcaaagacaagctaatttaaaagtattgtttgagagagcaaaacaatttgaagaaaccagtcttaaaggaatattcaactttgtaaattttatagagaaattaaaaaaatctagttctgatatgggaagtgcaaaaacacttggtgagaatgcaaatgttgttagaataatgagtattcataaaagtaaaggtctagaatttccagtagtcatatgctctgcaatgggtaaaaatttcaatactcaagattttaaaaagagtattttatatcatcataatttagggtatggacctcaatttgtagactatgagagaaggatttcttttccaagtatagccaaagaagcattaaaaagcaaaataaatatagaaaatttatcagaagagatgagagttttatatgttgcatttacaagagctaaagaaaaattgattataactggttctactagaaatatacaagatagtataaagagatggtcaaatggaattgaaagtttagatacaatatcacaatacgagatattaaaaggtaaaaattttttagattggataatgccttgtgtattaagacatagggatttatctaatctactagaagaagtaggattagacgcagtttttaatgttgaacataattcaaaatggtatggaaagttgtggaataagaatgatattttagtggaaaagaagagtgatgaagaaaaagaaagtattgaagaaattcttgaaaaaatagatgtagatagtccggacagtgattattacagtgaaatagaaaaaaaattaaactatatatatccatatgaatttagtacaagaaaacctgctactatatctgttacagaaataaaaaagatacaaaataattatgaagaagagttaataaatactatatttgaacaaaaagtaatattaaaaaagcctctatttattcaaaatgaagaagaaagagaaaaaataagtggaacagaaagaggtacaatagtccatttggttatggaggttttagacttaaaaaatgtaagtagtgtaaatgatataaaatcacaaataagaggttttgtttcaaaaggtataataacagaaaaacaagctagtatagtaaatccatataaaatatataaattttttgcctctaacataggaaaaagaatgttgaatgctgaaattataaatagagaaaaatcaatttatgcacaagtaaatatgaaagacatatatatttatgaaaagcttataaacaatgatgataaaaaactttatgataatgaaagtgtcatgttaagaggtatagttgatgcttattttgaagaagataatcaaatagttttggtggattataaaacagattttgtaaatgaggaaaatataaatcaaataatagagaaatataaaaaacagttggatttatatgcagatattattgaaactttaactggtaagtcagtaaaagagaaatgtatatatttatttggagttgatgaagctgtttgttattagtttttatatataaattaaacctaaaagatagaggaaggggaaaaaatgagatttattcatacatcagattggcatctagggaagtccctagaaggccattctagaattgaggaacaagcaaagttttgtgaggaatttataaaaatagtagaatcaaatgaaatagatatggttataattgctggagatgtatatgatacttctaatcccccagcacaagcagaaaaactattttatcagactgtatcaagacttgccaataatggtcagaggtgtgtattaataatttcaggaaatcatgataatccagagagactttctgcaataacacctctagcacatgaacaggggatacttatatatggttatccattaagtgctacgatagaagctaagtataaagggtttgaaataacatatgcaactcagggatgtacaaaactgaatataaatggagaaaatattgtgattgctacattaccttatccaagtgaaaaaagattaaatgaagttttttcaagtgaagatgagtttgagaaacaaaaaaattattctgaaaaggtaggagatatatttagaagtttagaagaaaattttagaagtgatactataaatatagccgtatcacatatatttgtaataggtggagagagtactgaatcagaaagacctatacaattaggtggaagttttttagttgaaagaaaagatttgccagaaaaggctcaatatactgcactaggtcatttacataaacaacaaaaagcttccgaacgtttaaatgcatactattctggttctccacttcaatatagcaaggatgaaagagcgtataccaaaggggcatacatagtggatataaaagctggagaaaaaccaataattgaagatgtatattttaataattacaaacctatagaagtatttaaatgtaatggaatagaagaagcactagatatatgtgagcaaaatcaagatagagagatttggtcatattttgaaataaatactgatgagataatatcacagaatgaaattaaaaaaatgaaggaactattaaaagacataatagaaataaaaccaataataacatcttgttatgaacaagaaagtgtagatataaaagaaaagtctatggcagagttgtttagagagttctattcttttagtaaaggtgtagagccaaaaggagaacttatggatttatttctagatataataagtgaagaaggtgaatcagcagatgagaccaattagattagaacttacaggacttaatagctatattgataaacaagttatagactttgaaaaattaattgaaagaggtttgtttgggatatttggaactactggaagtggaaaatctacaatcttagatgcaataactattgctatgtatggaaatatatccagaaatacaaaagaatatataaacagtgtgtgcgataaggcaattatatcatacgagtttgagataggaagcaaaaacactagaagaagatacattgtagatagaaccattgctagaagcaaaacaggaacaaagacctctaatgctagattaatagaagtattgaatgacaatatccaaaatgttttagctgataaagttgtggaagtaaatgaaaaagtagcacaggttgtaggattaacggcaaatgattttactaggtcagtagttttaccacaagacaaatttaatgagtttctaagattatcacgtgcagatagaagagacatgttagagagaatttttaatcttgagaaatatggaagaagtcttggagaaaaagtgaaaaagagaaaaaatatacagttacaaaatttaaaagatttgaaatcaaaattaagtcaatatgatggaattacagaggaagtatacaacaatataaaccaagaattaatagagttaaaaaatttggaaaaagataagaataatgctttagacctagctcaaaaatcttatgaagaaagtaaaacagtatatgaagaacaattaaagttagaaaaaaatgaacttagaaaaaatgagcttgatttaaaaaatagtgagataaaagaaaagattgctcttgtagaaaatgatagtaacgctaaaaaggtagacccatacataagttcagttcaaaatctagaaaaaaagatagatgaagatagctttgtagtaagtaatttagaaaagaaattagcaatattaaatcaggagcttgaagttacaaaaaatagatatgaaaaaataaacaaaattaagaatgaagaagtccctaaattgagtgaagaaaaaataagattgcaacaagcaataaaattagaagaagagttagttttattagatagagagttaaaagatctaaaagaaagtggaattaatttaaataagactaaagttgaattagaaaaagtaaagcaggtgtcagagtccagaaaagatgcagttactaaatctataaaagaagttgaaggaaagattgataaagtaaatataagtgcagaattaaaacaaaaaatatttctagcatatgaatacgagaaagattacaacaacgtattggaagaaaaaaatcaaaagctaaataaactagaagaaatactcaaagagacagaaaatataaatttaaaagttagatatattgataaagataagaatgatgtaaatcgtaatttagaaaatttatcacttcacttggatgttcttcttaaaaaatgtcctggtaagagtgctgatttacttttaaaatctgaatatgttactgaattaagaagtaaagcaaataatactaaagaaaatgaaattaagaaaagcagtatacaagatgaattaaagataatacttgaaagtaagtttaatactgaaagggaagtaaatttactaaatgaaaaacttgaaaataatagaaagaatagagatgacctagaaaaagaattagaagaactaaagtatttaaatttagcctctgaacttagacgtgaattaaaagaaaatatgccttgtccagtttgtgggtcaaaacatcatgaaaatcataatataactaagtatgatgaaaatatatcttttgtcaaagaaaaactggagaaattagaaaaagaaaaaataagtataagaaacaatatagaggaattaaatgctaaagtaagtgggtatttatctatagaaaaaatgaagactaaagaacttgaagatgtaaaaggaaaactaggggggattccatctagtcaattattaaaaaaacttgatgaagaacaaagaaaacttgcattgttaaaatctaatattcaggagtgggagaaagaaaaagagagtactgaaaataaagtaacattagctaaagaagaaaaaaataaaattgaaaaagaagaattaaaaataagagagagtctgaataattataagaaattaacaagagatttaaacatagaaatagaaggtttagaaaataaatgtaaaaaacttaaacaggaatacctaggattaaagacgattactaaagtctctaatctattgtcaaaagtaaaagaaataagggagaatgaaaaagaattagaattactaagtactgggcattcaaatttattaaaaaatagagactcactagatattaaaataagagaaaatgagagtaaactacatgaaatagagatagaattaataaaggctagagaattatatgtagaaaagaaattgagtagagataataagtataaagaagttattaacataacgaaaggtgatttagctaaaaatcttttacataatgttgaagaaaatatatgtaagatattagaacaagaagaatcaagtaagaaaaaattggaagagcaaagattagaatatgaaaaaaacattgctgaaaagcacaatatagatggtagacttaaaactgctaaggaacaatataaagaccaaaaatcaacactaaataaactattagcagaaaataaatttgaaagtatatatgcagtaaaaagagctttattagatactgatgcagtaaaaaaattgattgaagaaatactagagcatgaagaagaacaaaagttattatcatttaagataaaatcatcaaaagaaaaattaaatggaagaagcataaagaaggagtactttgaacagttaaaagatgaaatttataatttgaaagtagaaataggaaatatatccaaagatattggagctaatcaaaatcagttaataacactaaaagactctttagataagataaatgattttaataaacaacttaaggtagttgaacacaatgtggacttattggaagaattagataaatgtgtgcaaggaaataaatttgtagaatatgtttctacaaaccaattaaaatatatagcattggaagcatcaaaacgattggatggaataacaaaaggaagatatgcacttgaaattgactcaacactaaactttgtaatgagagataactttaatggaggagaaagaagaagcattgatactctatctggtggagagacattcttgacatctctatcattagcacttgctctttcatctcaaatacaattaaagggaagtgcaccattagaatttttctttttagatgaaggttttggttcattagatagtgaacttttagaaattgttatagaatccttggaaagattgcatagtaataatctaagtgtgggtataataagtcatgtcgaggaacttaaaaatagagttcctgttaagctattagtttcatctagtgaggctggaataggttcaaaagtaaaaattgaatatagttagaaaatatatggtaattgaatatattatctaatatttccaaataatatgtaattgtgatataataaaaactaatattaaagttatttataattaatattaatataaaaacatgtaagtaggagtgtggtaagtgttggaatcgcccaataatttgattcagattatttttttaatagtattacttatagggtctgcatttttctcagcatctgaaacggccttaatgtcgttgagtaaaatcagaatcagatatatgcaagatgaaggagttaaaggagctaagttagtaagttcattaatagaaaatccaaataagcttttaagttctatattggttggaaataacgtcgtaaatatagcagcaacatccatatcaacatctttgtttataggattaatgggagaaaaaggagtggcacttgctacagctgttatgacagtattagtattaatatttggtgagattactccaaaaacaatagcagcaaataattcagaaaaggtttctctattagtatctaaacctataaaagcaattatatttatattaagaccaatagtatggatatttaatataattacaaatattatatttaaattatttggtataacaaataaaggagctaaatcattcataactgaagaagagctaaaaactatggtaaatgtaagtcatgaagaaggcgtccttgaaatggaagagagagaaatcataaataatgtttttgaatttggagatatgcaagctaaaaatgcaatggtacaaagaatagatatggtagctatagatatggaagatagttatgatgagataatacaggtatttaaaactgaaaaattaagtagaatgcctgtgtatgaagaaactatagatgatattgtaggaatacttaatataaaagatattatatttttatctgatgaagaaatagagtcatttgatattaaaaattatatgagagaaccttttttcacgtatgagttcaaaaagataacacaacttcttgaagagatgaaacttgaaaaaagtcagatggctatagttgtagatgagtatggtggaacatctggacttttaactatagaagatttagtagaagtcattgttggagatatagaggatgaatatgatgaagaagaggatgaaatacaagttataaaagaagatgagtatattgtagatggaagtactaaaattggtgatgttaatgaacttattggtgtaaacttggaatctgaggagtttgattccataggaggttttataattggacacctaagcagattgccagaagaaaatgaagtaattgaagttgataatataagattttgtatagaaagtatagaaaaaaatagaattaaaaaaataagaatatatacataatgtaataatgttcttaaatttattagaagtgtataaatataaaagatatcttttatatttatacacttctttttattttgtattcaaataaaactagtatgaaatggacaaaataaaaatataaattagaagaaaggagatttttaagatgagcatactagaaaataattttttatacaaattaaaaaacaacactatctttttttgtatatatacattgttatttatttttatttacaaagcgtttccatacatagctccattttttctaggtgctataatagcacttatgattaatcctatagcacaaaagttagaaaataagtttcgtataaataaaggtatctctactcttgttctaagttttcttgcagtggctatagtcagtacagttactacaataatagtaataaattcaatgaaagaattaatgggatttttaaataatatatctgctaatcctgaggatataagtaatactattatgtattttttaaataaaataaatgactttatgaaatcatttcaagaaatagccaattttgatgtagaacaattagtaaacaaattcagtggtgaagtaatgcaaattacaaaaaatcttcttactagtatacttggattggctacttctattccatatattataatatttataattaccttgtttattgctacctactttatagcaaaagaccttgataagattgaaaatagtttttataatatgtttactgttgatgttagaaagaaggtaaaaaacgtaaagaaagaggcagggctttcacttgttggatatataagggcctatacaatacttatggctataacattttttgcaatctggggaagttttgctttatttggattgaaatacggtctaatagtagggtttgtagggctttaatggatttaattccattcctaggtataataacaatatatcttccagtaattgtttattattttcttataaaaaattattttatagctataagtatgactgtgatattttttgttttgtctttgattagagaaatacttgaacctaaactagtatcagtaaatgttggactaaatccattagctaccctagcagcgatttttattggaatccaagtaaaaggaataattggagtaattttttgtttgggtttggtatgtatgcatgatatacttaagaaggtggatattttttaattataataattgatagatttttttaaaaataaaattttattcacaggtaaataaaaaaatattaatcttattaagaaagagggtatatacgtgaaacaaaaagtagtggaaagatttttaaaatatgtatcatttgatacaacatctaattctcagtgtgagaactgtccatcttcagaaggtcaaagagttttagctaagtatatagttgaagagctaaaaacaatgggtgttgatgatgtgagtttagatgaaaatagttatataatggctactttaaaaggaaatactgatggtgtggatactataggattcatatcacatttagatacaattgaagatgttagtggaaaagatattaaaccaagaataatagaaaattatgacggaaaagacatagttttaaatgaagcgttaaatgttattacgtatgtaaaggattctccagagttggaagaatttaaaggtgacgatttaatagtcactgatggaacaactctacttggctctgatgataaagctggtatagctgagatagtgactgcaatagagtatctaataaatcatccagaaattaagcatggagatataaaaataggatttacaccagatgaagaaattggtagaggtgctgatttatttgatgttgaaaaatttggagcaaaatatgcatatactttagatggaggaatagttggagaacttgaatgtgaaaattttaatgctgcaaatgcaactattactatacatggtagaaatgttcatccaggttcagctaaaaataaaatggtaaatgctatacatatagctgctgaaatatcagaaatgttcccagcagatgaaagaccagaaacaacagaaggatatgaaggattttggcatttaaattctataggtggaaatgtcgagaatgtaagtatggcttatattattagagaccattgtagagaaaaatttgaaaatagaaaatctattatgatagagaatatagaaaaaataaataagaaatacgataatagagtggaattggatttaaaagattcttattacaatatgaaagaaaagattgagccagttatgtttatagttgatatagctaaagaagctatggaggaattaggtataaaaccacgtttagttcctgtaagaggtggtactgatggagcaagattatcttttaatggattaccttgtccaaatatatttactggtggattaaacttccatgggaaaaatgagtgtataccagttagttctatggagaaagctactaaactaattgtaagaatagctgaaaaatatgctgaaagagtttagttaaaaagtatttaaaaattaagcatttaaagttataatagctatatcattctttataagtcaagctgattataagcttgtgttgtatttaaaatggtatagctatttttgtaattatttttataaaagataattatttttagtttagggtatcaataaaaagtatggatatcaataggtattaacatttaaaagggggaattgtattgaaaattaaatctaaaaaaataatagcatttgcactttcacttgggattatgttgccaagttgtgtatatgcagacactattagtaaaaatcaaaatgcacaggtagatatgaacaattatcttcaaggtagaaaatctccaaaggaggaaaaacttattggtgaagatagatttgatacagcgataaaaatatctcaaagtggttggaataatggttcagaaagggtgtttctagttaactcaaattcattgccagatgcattggcttcaactcctttggcaagtaaattggatgcaccaatactgcttacaaataaaaatagtataccatataatgtaacagaggaaataaaaaggcttaatccagcagaagttattttaattggaagtgaaggagctatttcatcaagtgtaaaagaatctcttgaagatatggaagtattagtcagtagaatcggtggagcagatagagaagaaacatctttacttcttactagacagctagatgatactggtgatttaggtgtctcaaaagtggcagtggttaatgggtataatggactggcagatgcaacttcaatatcaagcccagctgcaagtgataatacagctataatatatacaggtaaggatagcataagaagtgaggcaaagaattttattacacaaaactcaactaagacatacatagtaggtggggagtacagtataagtaaaaaacttgaaggacagttagtaaactcagaaagactagcaggaacagatagaaaagatactaatgcgaaagttttagaaaagttttatggaaaatcaagtaaggttaataatatgtattttgcaaaagatggaagtggtagagaagctgatttagttgatgggcttgctgctggagtattagcatcaaaaacaaagtcacctgtagtacttgcaagtggaagtttaagtagtgcacagaaaagttttataaaaaaagtaaaggctgataaatttgtacaagttggtggaggtaaaaatagtaaaccatatgcagaagcattagccttacagtaatattgtgtaaatcaaaattaatatataataatagcaagtaaaccaagttgaacttcaatatatataataaaataagtaaactaagttatatttcagtataatatataatgaaataagtaaactaagctatgtttaaatataatatataataaaataagtaaactaagttatatttcagtataatatataatgaaataagtaaactaagttatactccaatataatatataatagaaacaagtaaactaagttatatttcaatatagcatataataaaacaagtaaaccagattctatttaattagaagtttaaggtattgtacttaaacttctaattgagatagaaataaaatggtttacttgtttttattatgagtttaataaattaaagcttattttatttttattaaaaatttactaatcattgatatttattatatttccagtattgatgtcaattaagtttatatcaagttcaagctcatcctcatcatcagtttttatgatatctataattgcgacagaatggcttccatcttttgggatagaagtacttcctggatttattactattaaattatcatccatgtatagtttttttacatgagtatgtcctaaaactaatatgtcaccacccattttctttgctttgtcaataatttcttcttctgattctatataaccatgattcaatataattctaatttcaccaaattggctcatgacataaggactctgaataggatgttctataaccatctggtcaacatctgcatcacagttcccttttacaatcacaatgttttctaatttatttaatgtctcaataaattttttaggattatatccttctggaatatcatttctaggtccatgatataagacatctccaccatgtaataaaacatcacaatcagataatacatttaacgctttttcaaagtaaagtaagctaccatgagtatcactcattattcctattttcatattaaaaatcctcctaagtacagtctataaaaatttttcagatactctatgccaaaactcatagtttgacattctaagtaattttatttttgcatcagatatactaacttttatattttcgatttgtctaaatctgtgctcaactccatcaacgacaatcaatacagaatcttcaaatctatattctggtgcaatctttataacagattcatttgaacatattatacttgatgtaaagcacctatatgcattggtatttatcggatgtaaaggtgtaatctgcataagttcaagatttatatcaacaatactacctccagcagaatagttataggctgttgaacctgtggaagtagaaataatcataccatctccactaaaattttgtatatgtttattatcaaggcttaaatttaggtgtatagtcctagacttgtctcctcttataacaacctcatttacagcaagcatattagaaccactagtagttgtatatacttccgcattaagaagtgacatttcttgaataatataatctttttttgtataagcttcaataaagctatcaatcttatctggtaaaatatcaggaaaaaaccccagatgacctgtatttattcccattatgggaatctcaggaaaatcgaaatctctaactgttcttaaaaaagagccatcaccaccaattgatataataagctctgtgtctggataaatatctgaatacacttcaaagccagcattgataagttttctagttaagagttctttagtctcaagggacttatttaattggtttgtatttatagttataattcttttcatatattcacctcttcatactttgtattataacatagttttataattcttaatttataaatttataaatgacctttgtagtgaatgtgttaaaatatgtataggtgggtataaaaaaatgcataagaggtgaagatgtgtttagcataaggaatatcacaaaaaaattaggaaaattcaagttaaataatataaacttagagttaaaggaaggggatattgttgggattataggaccaaatggttcgggaaaaacgactttaataaaaattataatggggattattgatgcagatgaaggtgaaattgaactttgtaatgaaactattgaaaattctccaataagctttaaaaacaatattggttttgtatatgattctttacaattttatccacatttaaaggttaaggaatttagaaaaatagtttctttattttataagaattttgatagagaaaaatttgatgaataccttaataagtttgacatagaagaaaatatgcatattgaaaatttatctaaaggtcaatctgagaagcttatgttatcaagcgcacttagtcataatgctaagttattgattttggatgaaccaactgctggtatagacccgattgtaagaactgaaataatgcagtacttacaagattttgtgaaaaatggaagtagtagtgtaataatttctactcataatactgataatttaattaaaattgctgattatcttgtttttataaatagaggaaatcagatttttactgttaagaaagaattaatagaacaagaatataagataattagggcaaataaagcagagttagaagcaattaaagaaagtatagttggtgttaaagagtataaatattataatgaggcacttgttaaagttggagatagcttgaaagtaaaaagcctattgatagaaattgataagcataaggtcaaaaatcctactatagaagaactaatgtattattatgtaaatgaggtgagaggatgttcaatttaataagaaaagatttaataataggaattagttcagatggtatccgtaatttaaagtacatattgctattttttgtgttttattttttccttaattcaatttcatattatacagtaagtattgttgttagttatttgatatttataaatacatttgagtgtgattatgaaaatgattcaaggatttttataaggagtatgccagttagtatagaagatatagtttactcaaaatatttattaggtgtaggactaataatttctgtaacaataattgtgtccttactaagtaaattgacatcactagtgttctttagaaatatggttttaaatgatgtatttttttctgtaaatatatttttagcaattttgacgattttactgcctttaatttttaagtttggatatggaaaaatgaaagtttgtggttttatagtaagtattttaatttactttgtatatggaagtcttttgaagatgattagtatgattgtatatcaagtaaagcattttaattatagtaaagttggaggagtatatctttcaaattatgtaactgatatagctaatactaagtatataaatttatatagtatgacatttttaacaataataatttttataatatcaatgtatttttctattaagatttcaaaaaagaataagtttaattattaaaattttaattaatattatagcacaatagcacaaaatataaggagactaaaaatgaagaagtttataaaagtttcattttttattttggggatttttacactattcatagctataaataaattagtatatagagatatggtaagtgtcaaagattatgaaataaatcatttagaggaaattgtttttgattttgatagcaggagaagtagagatatcggtactattgtaagatttaaaataagcaataatagtaaatatagttataaattaaacagtgctaaaatgaagtttgaaaattgtgtggaaaataaaaagggaatgaataagtgttctgcatatgtaaatgtagatttatttaatgaaaaaaattctataactgaaagtactctgaaatatggaataaaaccaaataatcaaggttatgttgattttgtaattccaaaaggactaaattttgattataggtactttaatgaatctggtatgagtgtagaatataaaggagaatatattgtcaatattccaatggcaaaaggactttatctagtagttggaaaaaataatgatacatggaatgctaatattatggaataatttgaaaaataaatcaattatagatataattaagaataatatgaaatttataaaaattcagactaggaggggtatttaatgtcaataagtaatgtaagagagtattttaaacaatttggcaaggaagacagtatattagaatttgaacaatctagtgctactgtggaacttgcagctgaagcagctggggttattccagcaagaatagctaagacactctcatttaaaataggagatgatgcaattttaattgtgacagctggtgatgctaagattgataataagaagtataaggctgaatttaattgtaaggctaaaatgttgacaccagaagaagtcttggagtttactggacatgctattggtggagtctgtccatttggtttaaaaaattctataaaagtctatttagatgattcaatgaagagatttgatacagtatttcctgcatgtggcagtagtaactctgcaatagaacttacatgtgaagaaatggagaagttttctaagagtgaaaaatgggtagatgtttgtaagaattggtaaaaaaatatagtaaactatagtaggaattagtaaaaaactacctctgtatacaatctatacagaggtagttttttgtgtaaatatttataaatctaagaggaaaatctaatttaaactaataatccaaaataaagttaaaaaattctgattttttttcgaaacaataaaaaaatgacaaaaaagtggaaaaaatgtaataaatattgttaaaaaaataattagaaattattgaaaaattatcctttgagtgttactattatagatgtaagatatttaaaaataaaaaatagtcagataaaaatacgattatttagctctattaaaataatttttatacgataaaaatcttctgtacatggctaaaaaacagatgtacagacaatatttaatgtttaatataccctaatataaatatcgtaaacaaattattttatctgtgaccagtgtgaaagaaatcttattctaacttgaaatttcacaaaattccaaaaagcgagattttttttaagtatagttgattttaaattaacaatttatgattaaattaatgtcataattggttagtataatcacatataaatatagagcgtagtttgattaaggttataaatttctcgacgtatattcaaataccttattatagatgttgccgagattttaattaataaatgaaaataaaatatttataaaatactgaggaggctattatggatttaaattctaaaaaatatcagatgcttaaagagctatatgtaagcttcgctgaaaatgaagttaaacctttagcaacagaacttgatgaagaagaaagatttccttatgaaacagtggaaaaaatggcaaaagcaggaatgatgggtataccatatccaaaagaatatggtggagaaggtggagacactgtaggatatataatggcagttgaagaattgtctagagtttgtggtactacaggagttatattatcagctcatacatctcttggctcatggcctatatatcaatatggtaatgaagaacaaaaacaaaaattcttaaaaccactagcaagtggagataaattaggagcatttggtcttactgagcctaatgctggtacagatgcgtctggccaacaaacaactgctgttttagacggggatgaatacatacttaatggctcaaaaatatttataacaaatgcaatagctggtgacatatatgtagtaatggcaatgactgataaatctaaggggaacaaaggaatatcagcatttatagttgaaaaaggaactcctgggtttagctttggagttaaagaaaagaaaatgggtataagaggttcagctactagtgaattaatatttgaggattgcagaatacctaaagaaaatttacttggaaaagaaggtcaaggatttaagatagcaatgtctactcttgatggtggtagaattggtatagcagcacaagctttaggtttagcacaaggtgctcttgatgaaactgttaaatatgtaaaagaaagagtacaatttggtagaccattatcaaaattccaaaatacccaattccaattagctgatatggaagttaaagtacaagcggctagacaccttgtatatcaagcagctataaataaagacttaggaaaaccttatggagtagaagcagcaatggcaaaattatttgcagctgaaacagctatggaagttactacgaaagctgtacaacttcatggaggatatggatacactcgtgactatccagtagaaagaatgatgagagatgctaagataactgaaatatatgaaggaactagtgaagttcaaagaatggttatttcaggaaaattattaaaatagataaatattaaaatatacacaataggtcgatattaaaatagatatggaggaaggatttatgaatatagtcgtttgtataaaacaagttccagatacaacagaagttaaactagatcctaatacaggtactttaattagagatggagtaccaagtataataaaccctgatgataaagcaggtttagaagaagctataaaattaaaagaagaaatgggtgctcatgtaactgttataacaatgggacctcctcaagcagatatggctttaaaagaagctttagcaatgggtgcagatagaggtatattattaacagatagagcatttgcaggtgctgatacttgggcaacttcatcagcattagcaggagcattaaaaaatatagattttgatattataatagctggaagacaggcgatagatggagatactgcacaagttggacctcaaatagctgaacatttaaatcttccatcaataacatatgctgaagaaataaaaactgaaggtgaatatgtattagtaaaaagacaatttgaagattgttgccatgacttaaaagttaaaatgccatgccttataacaactcttaaagatatgaacacaccaagatacatgaaagttggaagaatatatgatgctttcgaaaatgatgtagtagaaacatggactgtaaaagatatagaagttgacccttctaatttaggtcttaaaggttctccaactagtgtatttaaatcatttacaaaatcagttaaaccagctggtacaatatacaatgaagatgcgaaaacatcagctggaattatcatagataaattaaaagagaagtatatcatataatttaaggggggataaagaatgggtaacgttttagtagtaatagaacaaagagaaaatgtaattcaaactgtttctttagaattactaggaaaggctacagaaatagcaaaagattatgatacaaaagtttctgcattacttttaggtagtaaggtagaaggtttaatagatacattagcacactatggtgcagatgaggtaatagtagtagatgatgaagctttagcagtgtatacaactgaaccatatacaaaagcagcttatgaagcaataaaagcagctgaccctatagttgtattatttggtgcaacttcaataggtagagatttagcgcctagagtttctgctagaatacatacaggtcttactgctgactgtacaggtcttgcagtagctgaagatacaaaattattattaatgacaagacctgcctttggtggaaatataatggcaacaatagtttgtaaagatttcagacctcaaatgtctacagttagaccaggggttatgaagaaaaatgaacctgatgaaactaaagaagctgtaattaaccgtttcaaggtagaatttaatgatgctgataaattagttcaagttgtacaagtaataaaagaagctaaaaaacaagttaaaatagaagatgctaagatattagtttctgctggacgtggaatgggtggaaaagaaaacttagacatactttatgaattagctgaaattataggtggagaagtttctggttctcgtgccactatagatgcaggttggttagataaagcaagacaagttggtcaaactggtaaaactgtaagaccagacctttatatagcatgtggtatatctggagcaatacaacatatagctggtatggaagatgctgagtttatagttgctataaataaaaatccagaagctccaatatttaaatatgctgatgttggtatagttggagatgttcataaagtgcttccagaacttatcagtcagttaagtgttgcaaaagaaaaaggtgaagttttagctaactaatttcttggggagggtattatgagtacaagtgatgttaaagtttatgagaatgtagctgttgaagtagatggaaatatatgtacagtgaaaatgaatagacctaaagcccttaatgcaataaattcaaagactttagaagaactttatgaagtatttgtagatattaataatgatgaaactattgatgttgtaatattgacaggggaaggaaaggcatttgtagctggagcagatattgcatacatgaaagatttagatgctgtagctgctaaagattttagtatcttaggagcaaaagcttttggagaaatagaaaatagtaaaaaagtagtgatagctgctgtaaacggatttgctttaggtggaggatgtgaacttgcaatggcatgtgatataagaattgcatctgctaaagctaaatttggtcagccagaagtaactcttggaataactccaggatatggaggaactcaaagacttacaagattggttggaatggcaaaagcaaaagaattaatctttacaggtcaagttataaaagctgatgaagctgaaaaaatagggctagtaaatagagtcgttgagccagacattttaatagaagaagttgagaaattagctaagataatagctaaaaatgctcagcttgcagttagatactctaaagaagcaatacaacttggtgctcaaactgatataaatactggaatagatatagaatctaatttatttggtctttgtttttcaactaaagaccaaaaagaaggaatgtcagctttcgttgaaaagagagaagctaactttataaaagggtaaaaatctaattaaaaatatatttgctgttaactagattaaatagtattttaatctagttaacagaatataaatactaaaataacaggaggttataactatgaaattagctgtaataggtagtggaactatgggaagtggtattgtacaaacttttgcaagttgtggacatgatgtatgtttaaagagtagaactcaaggtgctatagataaatgtttagctttattagataaaaatttaactaagttagttactaagggaaaaatggatgaagctacaaaagcagaaatattaagtcatgttagttcaactactaattatgaagatttaaaagatatggatttaataatagaagcatctgtagaagacatgaatataaagaaagatgttttcaagttactagatgaattatgtaaagaagatactatcttggcaacaaatacttcatcattatctataacagaaatagcttcttctactaagagaccagataaagttataggaatgcatttctttaatccagttcctatgatgaaattagttgaagttataagtggtcagttaacatcaaaagttacttttgatacagtatttgaattatctaagagtatcaataaagtaccagtagatgtatctgaatctcctggatttgtagtaaatagaatacttatacctatgataaatgaagctgttggtatatatgcagatggtgttgcaagtaaagaagaaatagatgaagctatgaaattaggagcaaaccatccaatgggaccactagcattaggtgatttaatcggattagatgttgttttagctataatgaacgttttatatactgaatttggagatactaaatatagacctcatccacttttagctaaaatggttagagctaatcaattaggaagaaaaactaagataggattctatgattataataaataagaatttgggaattaaaagtttaaataaaattgtttaaaaaacaatttcggatatatgaaaaatctaatttaatgggggtaatgaatatgagagaagtagtaattgccagtgcagctagaacagcagtaggaagttttggaggagcatttaaatcagtttcagcggtagagttaggggtaacagcagctaaagaagctataaaaagagctaacataactccagatatgatagatgaatctcttttagggggagtacttacagcaggtcttggacaaaatatagcaagacaaatagcattaggagcaggaataccagtagaaaaaccagctatgactataaatatagtttgtggttctggattaagatctgtttcaatggcatctcaacttatagcattaggtgatgctgatataatgttagttggtggagctgaaaatatgagtatgtctccttatttagtaccaagtgcgagatatggtgcaagaatgggtgatgctgcttttgttgattcaatgataaaagatggattatcagacatatttaataactatcacatgggtattactgctgaaaacatagcagagcaatggaatataactagagaagaacaagatgaattagctcttgcaagtcaaaataaagctgaaaaagctcaagctgaaggaaaatttgatgaagaaatagttcctgttgttataaaaggaagaaaaggtgacactgtagtagataaagatgaatatattaagcctggcactacaatggaaaaacttgctaagttaagacctgcatttaaaaaagatggaacagttactgctggtaatgcatcaggaataaatgatggtgctgctatgctagtagtaatggctaaagaaaaagctgaagaactaggaatagagcctcttgcaactatagtttcttatggaacagctggtgttgaccctaaaataatgggatatggaccagttccagcaactaaaaaagctttagaagctgctaatatgactattgaagatatagatttagttgaagctaatgaggcatttgctgcccaatctgtagctgtaataagagacttaaatatagatatgaataaagttaatgttaatggtggagcaatagctataggacatccaataggatgctcaggagcaagaatacttactacacttttatatgaaatgaagagaagagatgctaaaactggtcttgctacactttgtataggtggtggaatgggaactactttaatagttaagagatagttttagattataatatttacaaattaaatatttaattatgaatttaacctgtatgaataactatttgttattcttacaggtttttatagttaaaaataattattatctattaaacaaaaatagtgtaaaatatataatatcatgattttgaagatataaaaagcaggaagatataaaagaaagtaggtaaaagtttgtttaaaaaagagaatcaaagatataatcttatatcgtatacaaatgaagaagaaatgactttaaaagaagttttattggacaagctaaatttctcagttaggtcattatcaaaaatgaagaaggaaaagagtgttttagtaaatggagtatataaaaaaccaagtttaaaggtgtatagtggtgatttaatagaagtaaaaatagacgaggaaaaagcaaattttgaacctcaagatttaaatttacagataatttatgatgattttgatataattatggtgaataaacctccatttatggtagttcacccaacaaaaagccactatgataaaacaatagcaaatggtattagttactatatagataatcaaaaagaaaacgtaaaaataagatttgtaaataggttagatatgaatacttcagggttagttatagtagcaaaaaatgcttatgcacatcatactttatctacagcaatgagtgaaaataaagttgaaaaaaagtatataacagtagttgatggaattataaaagaaaatgagggaactatagatgagccaatttatagacctacagaagattcaataaagaggataatagatgaaagaggacagtcatctgttactcactataaagtaatagaaagactagaaaatgcaactgtattagaagtaagcttagaaactggtagaacacatcaaataagagtacatatggctcatataggtcatggaataataggtgatgagttgtatggttatgtagatgaagagctaataaataggcaagcacttcatgcatacaagctagagtttgaacaaccaagaacaaaagaaaaattgaaatttaaagcagatataccagaggatatgaaagagttaatatcgaaattaagataatggggtgatatatatgataatacataaatttataatacatgttttggacaaaaatagtgatgttccaatattaaatgactttgaaggcaaagttaatcaagaagtagatggttttttccagaaagctataaaaagaattgcaaaagatgaggatttaagaaaaggtgtttttaaagattataatgacaatttaattaaaaactgttgtgaacaaataatatatgatgaaagtacttttttgaaaaattctaaagaaattgcatcttacttgtttgacgttatgaaaattaatgctgcactagaatcttgtgatttggcaatttgcttatacactattaaagatgaaaagagtgtagcaatactgaaattagattataaaaagttgtacactcattcaattgaatttgtggatgataaatttaatattcaaatggtttcaaatgaaattggtatcccagagactttaagacaaaagcaaggagctttgattagtttaagtggtataaatgatgagtttcatctaaggcttttagataaggatgctgaaaaagaagggtcagaatctaagtttgtaacagaatttttaaatgctaaaaaaatagatgatgataagtacaagaccaaggtatttaaaaatacagctgaaaattggataactaatgctcttagtaatgatataaagcaagctgaagatgtaagaagtatattaaattatacactgaaggaaaaacatgaagttgatataaatgactttgttgataattcaattaaagatgatgagttaaaggatagctttaaagagcatatggaagaaaaaggtcttgatgaaagttttagtatagataaaaaatgggttgagaaaaagcttaaaaaaagaagtataaaaacggataatggttttgacataaaagggaatctaactgattttgaagacccaatgaagtatactgtaaagcaaaatcaagatggaactatagatataataataaagaatgttacattttatgaagaaaagtaatttatatacttagtatataaattaaatataagagcgtgtattttatatattgtaaataaatgtaatctagtctgtgcgaactctaatataatttattatgtagaagtttacacagactatttatatttgtagacaaaacgatactatttgttttcttcgatatatttacatatatcaccaatacatttaaagttctcagcttcctcgtctggtatttctattccaaattcatcttcaagggccattataatttcaacagcatctaatgaatcagcttctaagtcgtccattaaagatgcttccatagttatctcatctaaattgtctacccctaattgttctgctattatttcttttattttctcaaacattttaagcctcctaaagcagttttaattaattttaatgttagtttaatataatatcaagaatttttcaatatggaatctataaaaaataataaaattttataaatgtagtaataaagtattatttgatgaataaactttattgataacaaatataacttaggaggaaatgctatgaaatatgtaggactattactaacttcagtaggaatgtttttacttatagcagtaaatttttattataattcaataactttagatatgcaacgtatagaggattatgtaatggagaccaatttaatccttgaagatgtagctgaaaaggagagttatgtatctaatgaaaaagaagactacatatcaaggttaatgcatgtaaagaaaggaatagaaaattcaaaaacatccttcttgatagaaagatataaggagtacaaaataaaatcaatagaaagtttaatctacactatatcagaggagaaaaaagattatctggatgaagttgatagatacaataaacttggtgaaaaagaaataaataaactaatcaataaaaactttttagaagtaacttatctgtctattactacatatatttaattaaagagacaaaacttagtctcttaatgattcaaggaggattagttatgacaaaattagaagacaatatggaacgtttctttggaggatgcgaaggattttttggtaataaaatgttgataataatagttatagtattcttactattatgcacagacattttagaagacttattatgcgatgacaatatatggatatgggttatattaatagtattgttattatttaacttcgatgatggttgttgttgctaaaaaatattgattattaaataggtaaaaccagtaacttatacaagttatggttttaccttttttagttcaaattaaaaaatttaaaaaaatagtaaaaatacattagcaaaatggaaaccaaatgcatagtatatgttaggagcgaaaagctcaacaaaatatcaacaggaggtaacgtacaatgttagatagattctttggagaagaaggatgttttggtggaggaggatggtggataatagtactattcttcctattcttagcttttggagatagctgggcagaatttgacataatggcatggataccattcctaatagttttattaatactttgctgctgtggtggatgcttagaataagaacacagttattaaaaaaaggagggctttgttatgttagatagattttttggagaagaaggatgctttggtggaggaggatggtggataatagtactattcttcctattcttagcttttgaagattgctggagagacattgacataatgtcatggatacctttcttaatattattgctaataacttgttcatgtggtggattctttgatggtgaagtaggttgcggctgctaatacttaaatcattagaataaaaaaatgctggtattttataccagtatttttttattttattttttaatatgatttaaattaagaatgaatattattaaatttgttgaatatagggtataatataaaatataatgtatttaaatgtacttgcttttatggtaaaataaaaacttatataaatgtagttaaaataggaaccttcaaaaatttggttcagttttagataaatttagtaaaataaggaggatgaagatgaaaggcaatataacgataaaagatgttgctaaacaagcaggagtgtcaatatctactgtatctagagttataaatgattcaaaacctgtaactgatgaagtcaaacaaaaagttttagaggttataaaagagactggatatataccaaatccacttgctagaagcttagtaacaaagaagagtcaattaataggggtaatagttccagaagtttcagattcttttgttaatgaggtgttaaatgggatagaagaagttgctaaaatgtatgactatgatattcttttagcgaatacatactctgataaggaacaagaacttaagagtataaatctattgagagcaaaacaagtggaaggtatagttatgatttcatggatagttgaacaagaacatatcaactatatacaaaattgtggaataccagcgacatatataagtaaaactgctagaaattatgatatatatacagtaagtactagcaacgaagaagctacttttgatatgacagagcatcttataaagaaaggtcatgaaaagatagcttttataatgacgagtaaagatgatactgttttagaaatggaaagacttgctggttatgagaaagcactttcaaataacaatatagaattagacaagagtttgattaagtatggtggaactgattatgagagtggatacaatagtatgaaagaactattagatgatggaataatacctcatgcggcttttgtaacaggtgatgaggctgccataggtgctataaatgctatatgtgatgctggatataaggttccagaagacatatctgttgcaggatttaatgatgttaagatagctagaatgtatagacctaaacttactacagtatatcaacctctatacgatatgggagcagtagcaataagaatggttataaaattaataaataaggaattaattgaaaataagaaaatagaattaccttatagaattgttgatagagaaagtgttacagaaagaaaaaaataaaactattaaaatcaatcaggtagtgcctaaggcactacctgattttttatgtcaataatatcaaatttaataatagattaactaaaaataattatctaattacttaaatagtttatttttatctactcatgagggttagactttttagttttcttaaataaacctttagattttttttgttgaccacctggtgtattttttggtgcaggtgaatttgatttacctttagtaggtttagccttcttagttttagctggtttagtatctctttgattttctgcatctgagattttttccattatattatctagttttttgcgttgattttcatctaaaaatgctttgaattttgatactacttcatctcttccatctaagttcttacctatttttataagttcctccataagttcattttctgattttcctttgtaactatcagccatcttttctattttatccttgtcaatatttttttgtttagccattttttctaatgactctgtatctaattttttcataaaaaaacccctttctataaatatatattgaattatattcatactatttatatatagaaataatattgaagtggtgaattgtgagtgatatataatataaataaaaattcttatagataatatatatgcactgagctttaaaaatggaacattaaaatatgaaaaacatactttaatatagggcaattatataatataagggggaattgtcttgaataacttactatttttgattggagtgattgcattgagtaatggtaatatctctatatttgatgataaaaataaatcaaaaggaaataatagagttagaaaaaacaaaaaaaatgcaaatgataaactttcacagtctacacatggcaatttaaggtttgatgcaaatgatataaaaagaggtttaaggctcatggatttaagtgaagaagatttagaaatgggaatggaaataataacaagaactaaaaaatacatgtcaagagatgaaagaaaaatactaataaaaatagaaagtgttttagatttagttagaggaataaaaaaattaaataatatagatatggtagatacagaagatgaaacggattttttcagaaaaatggatagtgatgataaaaagaatatgatgataaaggaaattatagatgtattcccagaaaaaagaaaaaattcagttgaaaaagctataggaatgaaaaagaagatagatttatttgcagaattatttttaccagatgactttggtgaaggtggatttagtttgagctctttggcaaatataaacaatcttggtagtatgaataatctcaaattgttaggaagtcttttaagaggtgatgatagtaataatgatgatgaagacaataatgatgagttaaattatgaagacgaagaattagattgtgaagacaaagaattggatgatgatgagttaacagatgaaggtgaaatggaggataatgaagatgaattagtagaagataagaacacaggctatgaaaatatagaaaatgatgaagatatagtatacgatgaggaactatacaacattaatgagcaagaatccgaatacaattataatgaaaaaaatactaaaactagagctaagaaaaaacgataattaactaaatacataaagaaaaaaggaagaaaaagtaatgatagaataagattatctcaattactatataaaaccactttaaaaaattcaaaatttattatataataataatatgaaatcctgaaacatacgataaggcttttttaaattcaacctacaaatgaaatacgggagaccgtgtctggtaaattataacatgcctagttagtttggacgttaaaggttactggcaagtcacccacctgggagtgcctagggtgtgaatttacttagccaccggtgtttcgggacaaaaaaagtgctactatttcaaatagtagtactttttttattaatatgcatttttctactaaatacgcctaattattgataaattcaaaaagcaagtaacaattaagattataaaagcatagtattaattaggcttcaaaaagccaaagacttaataagaatcgcttacagggagggcaatgaaaaatgcaagattataaaaaaaataaaagaagaatgatgaatcagccaatgtctacaatgaatgaagaagaagtgtatacagatgaaataaattcagaagacatgagagggtttaaaaaatcacaccatcataatggatgtaatactgataataagtgtgagtgccatgatgagtgtaatccatgtaacccatgtaatccatgtaaacctaacccatgcaatccatgcaaacctaatccatgtgatgacaaatgtgaatgccatgacaagtgtaaatgtgattgtgaaccatgtgaaatggattcagatgaatgttttgaaaacaaatgtggaccagaatgttgtaatccgatatctccaagaaacttctctgtatcaaatgcagtgccatttgcaatagaggctaatagaatatttgatactatgcaattccaaacatttacagatgcaacaggtccaaatggagaaccattaacttttgaaacagaagtagtagaagtatttggttcaattccaagtgcaggtcaagcaagtgtaactatagaaaaaatatgcttaagtaatgatggaatagttatagacacaggaatgacaactttagaagatttcgatttagacccattaggagatatagtaggaagaaactgtgaaacaacttttgaatttgcagtttgtggagaaagaaacgctgagtgctgtagacaaggaaaaggcaaatcagtagcttataaacaaagaggattaactgtagcagttcgtaatttagtactagagctaagaggtagatgtggatgtacagagttcgttgcattagctttcccagcagttagagcaggaggtggatgtaagagaagagttgattatgtagaatttacttttaacacactttcagcaccaatatgcttgccagctgacggaagagctgttactttaagacaagaatatcaaactaacttaactgtagattgtataggaaaatctatattaaaattagaatgcaacgaatgttgtgaacctttctatgaattaattataccaaatgatatagatttagtactttgcttacaagaaacagttagcacattaataagtgaacaaatagtagttttagcatcaccaaatccaatccaaccaagacttgttgatactttctctaaagtatgtgatttttcgcaatgtggacctaatcatggaagtggaaagccaagttgccacagatagataggtaagatatatagacagtttaaattataaataaaaatcatctaaggaaggctaccaaagtgtataatttacattggtagccttcacgtttttataactagcgtatagattttagtgatttaaaaagcactatagtatgtaatagacaagtaaagattgatactatcgtcattgtgtatatgtatgcataaatattaagtcctggaattggaagaaatacatataaagctattagttgaattaacatgccagtaatagtatttatacttgaagctaattcttttcttattgaatgtaaaatgccagatagagtttgatttagggacataaatagtggaactaaaaacatagcttttagatattctcctgcaagtgtatttttaaatactaatatacataaatcttttccaaagaaataaaaaaatattgatgatagtatgcctacaaataaagtaagaagtatggagtatttgatttttttaattacactcttacgctttcttagagccatttcctgtgaaatagttggtattaaatttacaataagcgctgaaccaacagtaaaaggtaaaaatataaagggcattaccatcccactgacaataccatacatacttaaagattgttgataagtcattcctgataatgctaatcttgatggtatcatcatagaacttatagattgcaaaagtatgtttgacattctattacaagttatgggaatagacatttttaatgtttccatagaagaattataaaaatcttttatgcttataatatacctattgtcaaatgatgaatctcgccataagcaaataagcataaatataatattgctcaactcaccaatagatatacctaatagagctatataacaattcatagatttattatttatgtacataacaagtaaaaaaacaaataatattttaccaatttgttcaatgatttgtccaatagcagggatttttacattctttatgccatagtaatatcctcttagtacgtttgaaagagttattataactatagcaggacaaacagctagtataaatagatttaatttagcatcttttaaaaatttaagtgataaaaaagaactattgaaagatgcaactatagatataattagtgctacgaaaaatgatatatataaagttgatataaatagagcattagtattgtgtctatcgtttaaagcttttctctttgcaactagacaactaagtgcagtaggtatacctgttgttgtaacagctaagcaaatcatcaaaaagttaaaaatcatatgatagatacctaaacctgtttcacctagtgctcttgataagaatattttatataaaaaaccaaatattcttacaataaaattggatataaataaaataactgttgatagtactaaataaggtactttcaaaaaaatcacctccttatcttttaaatatattcacaaggaggtgtaaaaatttataattttataaattctggtttcaatttattaaatttagatacatatttaaatcccatattttttagtaatgaatatatgtagtcaaactcacatgcaacttgacttatatgatgtgaatctgaacctgtggttatgatttcccctcccaagtctttgtacatttgaagtatatacttagatggggttaggtctggaagattatatctataacaagaggtatttatctcgatacctttgccatcataaatagcttgtttaagagtttcttcaattatatcagaaaatagtctatcatctaaaatagtgtcataaggtgcataccttttaatcaaatctaaatgacctaagacagagtaatctttataattcttaacaatattatataaataaagatagtaattttcataaacttcatattgagttttatctttaaaataattaccaaggtataagtccattgtatctatagcatggatagaacatattataaagtccaatggatattgatgtgcttcctttttgtatgtatccattaattgagtttgaactccaaattcaattcctttttttattgatattttatctttgtatttgctttgaagagtctctaaactcttaaaataatcttcgtagacaattgaaaaagaatcatcagcatatacatcatagtcaacatggtctgtgaaacaaatttcctccaaaccgagttcaatagatttttttaccatttcttccattgtagattttccgtctgtagagaaacttgagtgcatgtgatagtcgtaaaacataaatatttcccctttttataaaaattttggtattatatatacatactaaataatatcaaatatatataaaagcatcaataaaatataaatacaatgagcggtgataaatttggaaaaatacagaatagatttaaatgagaaaaaatcaactaaatatatacagatatttaatcatataaaagaattgataataaataaagagttagtagaacatgaaaaattgcctccaataagaaaactatcaaattttttacaagtaaataacactactatagttaaggtatacgagcttttagaaaatgaaggatatgtatataaaattatagggagtggtacttttgtatcaagttcaaattcttataaaagcggtatagataacaggaaaaataagattattgtgcaaagagaagatttaattcattttgacaatgggaatccatctaatgatatgtttcctatcgattcatttaaaaatgctgtaaatatggcattatctaaagatggtagttcaatatttgaatatgatgaaggtcttggctctgaagaattaagagaaaaaatggtagagtatctaagtgatggaaatataaaaactactaaggaaaatattcaaataatatcaggtgctcaacaaggtatagatatagtttgtaaaggacttataagttattcagatgttgtttttatggaagaaccttcttacaatggagcaattgaagtgtttaaaagtagaggtgcaaaaataatatctatacctatgttagatgatggaattgatataggtattttaaaattaaagttggaaaaaataaaaccaagacttatatacattatgcctaattttcaaaatccaactggaatatcttactcaacatataaaaaaaagaaattgatagaattggcagaagaacatgatttttatataatagaagatgattttataagtgattttgtttttgaatcaaaggacaatagaacaattagaagttatgatgataaaaatagagtagtatatataaaaagcttttcaaaaatacttatgccaggtcttaggataggaattgtagaaatgccaaatgagttgttaaaaaaagttttatgggctaaatattcatcagatatatcaacaccaggtttaattcaaaaatcaatgtattactatatgaataattttgattggaagaattatttgagtcatatagagaagatatatactaataagtataaattgtcaaaaaacttgattaatgacaaattgagtggtaaattaaaagttagaaaatcttgtggaggaataaacttttttttagaattaccaagaggatatacatctcaagcatttacaaattttatgttaaacaaaggagtgtcaatgcttccaggaacttatttttttgacaatctagtggatgatagattctttaggataaatatagctcgcccaagcatggaagaactagaaaagggaatatctgtaataagtgataatatagatgagtttttttgtgaatataaaaacaagttagatataaaaagcaataaattattttattaaataaatagaggttttttaggaggaaaaaatgtttgacaagaagaaattagataggattaatgaattagcaaagaaaaataaagagggaatcctttctgctgatgaaatcaaagaaagagaaattttaaggaaagaatatttagaaaactttagagctcactttagatcaagactagatagtgtcaaagtagtttcaccagaagaatatgagcaatacatgaaaaacaataaaaattagaacttagtaggaggaaaatatgaacttaaagtacgaatttaagaatgcttgggattttgaaagaaaagaaaatactattgaacaaattatgcaatattctcgcaattatatggagtttttaagtaagtcaaagactgaaagactttcagtaaaagaaattataaaattggctaaagaaaataactatatttcaatagatgaagctatggaaaaaggaagcataagttgtggtgataagatttatgttataaataaagagaaggcagtagcactttttgtaataggtaaaaattatatagaaaaaggtatgaagattataggaagccatatagattcaccaagattagatttaaaaccaaatccactgtatcaagagagtaatctaggtttttttaagactcattattatggtggaataaaaaaataccagtggacagctcttccacttgctttacatggtatagttatattaaatgatggaacaaaagtggacatatctattggggaagaagatagtgacccagtattttgtgtaactgatttattgattcatttggctggagaccaaatgcaaaagaaactatcagaaggaattagtggagaagctttaaatatattaattgggaatattcctttagaagatgaagaaaaagaacctataacagcaaatatattaaagattttaaatgagaaatacaatatagttgaagaagacttattaagtgctgaaattgaagtagttccagctggtaaggctagagatttagggtttgataggtctatggtgttgggatatgggcatgatgatagggtatgttcatatgctgctgtaaaagctatactagaaactgaacaaccagaatttacttcagttgcattatgtgtagataaagaagaaattggttctaaagggaatacaggtatgcactcaaagttttttgaaaatactgtggctgaactgattgctttagaaggagattattgtgatattaaagtaagaagagctttagcaaatagtaaggtattatcagctgatgtttctgctggatatgacccaaattttggagaagcatatgaaaagagaaattcagcatatatgggaaatggagtagttttaactaagtatacaggttcaagaggaaagagtggatgtaatgatgctaatgctgaatttatgtcagaagtaaagagaatttttaataaaggaaatgtagtatggcaaactgctgaacttggaaaagtagaccaaggaggaggcggaactatagcccatatattggcaaatcaaggtgcagaggttatagactgtggtgttggagttttaaatatgcatgcaccacatgagattgtctctaaagtagacatatatgaaatgtataagggatataaggcattttttaatataaatttataagtaaaaatataaatgtaataagtgaataaaggctgttgtataaacaatttaatctgttgtacaacagtcttatttttatgtaaaaatagcaatttgtcacactagagaaaataaaagaaaatactgtcaaattaaaaattatttaaaaaaaaattgacaacgatttcatcttgttataatatgtaataaagaacttgttatataatgttataaaaatgttacatagggaggtgagcaaaatggatgaaaagagacaaaaaaaagaaatggatttagaagtaaattcctttgttcctttatatcaacaactatatgacaacataaaaaaacaaatagcatctggcatatataaaccaggagataaacttccatctgaaggagacttatgtaaagaatttaatataagtcgtataactgtgagaaatgcacttaatgaacttgtaaaagaagatatattatgtaaaaaacgtggtaaagggacttatgtaacaataccagagagaatagaagcaacatgtgcaggaaatagttttactaattcttgtcatcgtattaatgcaaaaccaagtaccaaaataatctctgttttaataaaaaaagcagataagcaagtagctgaagctttaagtattgaactagaagagaaggtaatatgtattaaaagacttagattaatagatgaagtacctgttatttttgaagttgactattttagaatagattacatgtttttattaaaagaagaattagaagataaatctttaatggaggttatatctaataatataagcacattacctaaacgagtagaaaatatatttgaagtaaaacattcaaacaaagaatattctgactatcttaaatgtgcaagtaatatgccactattgaaagtaagacaatcggtgtatacagaaaataatgatgtcttatattacaatgagcaatttataagaagtgataagtacaaatatgcagtatcagcagaaatataatctatatttagtaggaggatgaagtatgaaaaagataatattagcatctcatggagatttttcaaaagggcttttaaatgcagtaaaaatgatagtaggagatttagcagattgtgttagttcgtatggtttgtaccctggacaaagtgcttcagattttgctttagaattagaaaaaacaatatcagaagatatagaatgtgaatatataattttatctgacttatatggagcaagtgtatgtacagcaatgttaagattaactaatctacataatgttaagttattttctggaatgaatttgaatatggtattagaacttcttacaaggttttctgatgaattaacagttgaagatatagaacaattagtggaagaatctagaagaggaatacaaagcgtgacattacaaattaaagaagaagaagaggtattttagtttatgaaaaaaaagggaatattatcagtatttaaaagtaaaaaaccaattatagcaatgatacacttaaaaggagatactccagaagatatctttgaaagagctaaaaaagagattacaatctttgaagaaaatggtgtagatggaataatgttagaaaattactatggtaattattatgatttagaaagaatacttgaatatgtatcaaaagctaatttgtcaataccatatggagtaaattgtttaaatgttgatactatgggatttgaactggcaacaaaatataatgctagttatatacaggttgattctgtagtaggtcatgttaaacctagagacgaagctactttagaagaattttttaaattacaacgttcaaaatgcccagcgtatttaattggaggcgtacgttttaaatatcagccagtattatcagaaaatgacgttgaagaagatttaaaaataggaatgacaagatgtgatgctatagcagttacagaaaatgctacaggtcaagaaacatcaatggaaaaaatagaactgtttcgtaaaaatttaggagactttccattggttatagctgctggagttacattagaaaatgcaaaaaaacagcttgaattaggagatatggcaataataggaagttactttaaagataattacaaagattttgggaatgttagtgtagaacacgtaaaaacattcatggatgaaatcaaaaaaattagggaggaattataatgattaaattagtaagagtagaccacagacttatacatggacaagtagcatttacatggacaaagtttttaagcacagactgtatattgatagcaagtgatgaattattaaaagatgaattaagaatggcagggcttaaaatggctaaaccatctaatgttaagttagtaatgaaaagcatagcagattctataaaagcacttaactcaggtgttactgataaatataacttattgatactttgtgaatctgtagaagatgtttatagacttgctaaagaggtaaaagctattaaatctataaaccttggtggaacaaaatcagatgataatcgtgaaaatatatctaaagcagtgcatgtatcaaaagatgatataaagatgattaaagagttagattcagaaggcgtaaatgtatttgtacaattagttcctgatgatgatgctacaaatgtaatgaaattaatataattttagggggatgaaaatggaatttacacaagttattttgataactctaattgcattctttgcatatatgcatagttttgtaggttctacaatgcataatagacctatagttgttgcaccacttgttggtttagcactaggtaatcttcatacaggtatagtaataggttcaacattagaattagtatttatgggtgcatttcctgttggggcaagtaatcctcctgattttgtgtctggttctattattgccacagcgtttgtaatattaacgggtcaagatgtatcagcagcagttgtacttgcagttcctatagcaactctagtattgcttatagataacttcttaatgacagtagtacttacatggggagctcatattgctgaccgttatgcagaagaggggaatattgaaggcgtagaacgtgtgcaattattatttggtataggaaataaattaatattagcaataatagtaggtataggattttcattaggtgttccagtaatagaaaaaatactttcatttataccatcatatgtaactcatggaatggatgttgcagcaggcgtgattccagcaataggttttgccatgttagctaggatgatgcttaataagaaaacagtagcatttttattattaggatttatattggttgcttacctaaacataacagtaacaggagttgcattgtttggattagcaatagctttaatatatgttaactttgtaggagagaaggaggtaatagtagatgacaacgagttctaagaagttagatacaatttcacccgatagtaaaataacgaggaaagacttttggaaatgctttagaaggtcattgacattagattcatcttggaactacgaacgtatgcaaaatatagcatatgcatacatgatggcaccaataatccgtagattgtataaagatgataaggaaaagaaatctaaggctttaaaaagacatttagaatttatgtcagttactcctcatataagtactcttttggtaggtatatctggagctatggaagaagaaaatgcaaagaataaagaatttgatgctaatagtataaatgctgttaaatcaagtttaatgggtccagtttctgggataggagattcatttttctggggaacattaaagcttatagcagctggagttggtatagctttagcttctcagggtaacataatgggaccgattttattccttttaataataaatgttcctcattttattatacgctatatatgtctagataaaggatttaagtatggaactcaattctttaaagatgtgagtagttcaagtatagtttcaaaagttatggaagcagcttcaatgttagggcttatggtaattggaggtatgactgcatctaatgtaatgttaaaacttagtgttaatgtaggtagtggagaatgggcagagcctattcaaacttacttagaccaaataatgccatgtatgcttccagctatgatattcggtattatgtattggttattaggaaaaaaggtaaagacaactacgatattaatttcagttatgattatttgtatagtattagctgctattggaatagtataaataaaaaaatcccaagttcatttgaacgagggattttttgactaaattaaataaaaaagaaagatggttcataataatttataagcatttatgtgatagttataattagcttattaattagttataaacccaaaattaagcactactttattaaagttattatattataatttcgaaatactcacataatctgtttagaaatttatcttctaatggggaaaaagttttctttttagagtaaataaagaaaaattttctagtaaaatcaacaccctttattttataacattttattttacctgcattgagataatcaatagctgaaatgtacgatataaaggagactccaagacctaatctaaccatttccttaatagcctcatttgattctacatgagctattacatttaatttacttactggaaagttatttttactaagtgtgtttagtattaagtttcttgtacctgacccttcttttctcataataaaatttagataagccaattctcctatatcgatacaattatttttattatcaattttaaaatctgaaggagtgataagaacaagttcatcatctaataagtctaggtactctatttgaggattattgattttagaaccaactaatccaaagcttattcgttcatttaaaatttctgatatagcatattgagaatcataatggcttatggaaaattttacatctggataactcatagaaaaactcttcataaaatcaggtaaaatataagtttcaggtatggaactacatgctatatctataataccttctatttttcctgaatattcttttatatcataaattgcacgtttgcaattattcaatatatatatagcatgttcataaagaatttcaccagattttgtgagtgtaataactttgttgcttctatttataagaacagtttccaactctctctctaaattctgtatgtgtgcacttacagtaggttgagttaaaaaaagttctcttgcggcctttgaaaaactctgatgttttgcaacagcaacaaatacttcaagttgtttaaaatccattatttaatcctccttaaattatctaaaactattataacatatttgataaattaatagtcaaaggtgatttttaaaatagaaaacctttaaatattcatggagtttttgattgtttaggaataatttggtataatattgtaaggtacttacaataaaaatatcgtaaattgaattttcaaaattcaactttaaagtgttttttattacagaaaaattacaattagcttcttaatcttattaaattcaaataaatattatataattattttataatataataaatataattattgaaaaaagagataactgtaaattgagatatagataaatactataaaatttaagaaaggaggattgatttatgaagttaaaaaggtcattagtttgtgtaactattttaggtattatacttgttggatgtcataaagaaaatactaaagagaaaaatcaagtagcaagtaaagcaacacagcaaaaaactatgacaaaagttcaaaatgatgttaatgaaattatgaataaagattataagtacattataaagaatatgggtataccttataatacattttattatataaaacctaaagttttaaaagaatcgaatacaatgcaagatataaatacatcaagttatatgacattagtttatccaaaatatactggaaatgatgaactagatggaagtgctttatatgttgatattaacgaaaataaagttgtcaatgttgaaaccaattctttctcatcacaaggtatatcagtcattgatgctgaatctagtgttgtgattgaaaaaagtgaccatgaaaaatcggctgtatcactagaaaattttagacgtattgacctgggagagtatgttggtgttgaagagtctagaataaatgaaattgtaggagatgcgaattatgatttaacagcatataatcatgaaggtagtaaagtagttaagagttatagattgaaagaagataacaaaatattaaaaaaagaggtacttacaataagtattgtggataacaaaataaaatctataaaaactattgaaagtgataaaattgtaaaaataataaaaggaactttattagaataaaatattctaaagcatatgatgctgtttcaagatagaaggaaatttctagctgggaacagtttttttattagatttataaaatttgaactgcacttatagataactattagttataattaaatataagataaaagtatttccaacttttataatctataatatattacatagaaatatcttaaataaaaaatatattggggagtatttaaaatgatagaattagaagatgccataaaaattattgaaaaaaatgttttaccaataaacagggtcaagatagtaaatcttatagatgcagtaaataaagtagttgcagaagatatatattcaacaattgatagtcctccatttgataggtcaccctatgatggttatgcatataatgcaaattctgaaaatagaaatttaaaggttatagggactttgtatgcaggagaagtatttaataaggtattaaataaaaatgaagcagtgaagataatgactggtggaaagataccacagggtgcaaactgtgtaataaaaaaagaagatgtaacggttataggtgatatgataattttaaatgtaaaattaaaggaatacgataattacatatttaagggtgaggatataaaaaaggggcaattgattattaataaaaatcagaatataggatatgatggtattggagtattagcaagtcttggaatatccaaagtaactgtttatgatgatttaaaagttggaattttgaatacaggtacagaactacaagatataaatgagactttagagaatggtaaaatatacgatagtaatagatataccttatattcaagattattaaaacttggaatacaggcagatacaatatgcaattgttctgatgatatattggagttagaaaaaaaggtaaagaatatgttacagagtgtagattttttaattacaacaggtggtgtttctgttggagataaagatttaattccagatgtattcaaaaaaataggggcaacagaattattttggaagataaacattaaacctggtggagcttgttatgtaggtatattgggagaaaagctattatttggtctttctggtaatccacatgcagcaatagtggtatttgataatgtgatagttcctgttattgagtatttaacatataagaagggaatacatcatataaaagctatatttaaaggagaatttaataaactttcaaataaagatagatttgtaagtggaaaactatatacaagtgaaggtaaattgtatgtagagctaaatgataagaaagatgcaaaagctagattatctgcaactctaagaagtaattgtatgattaagattaaaaagaatgagacaataaaagaaaatcaattagtggagattgttattagatagttttatgaaaggacacaattttatgtataatatattgtcagttgtctcatattcaggagtaggtaaaactacgttgattgaaggcataataaaagaattaaataaaaaagggtatcgtgttggagttattaaacatacctgccatgattttgatatggatgaggaaggaaaagatacttataaacatagaaaatctggggcgagaaaagtctgtataatatcagataaacgagtagcatatattgaagaactaaaagagaagaatccattatataaaatgattcaattatatgaagatatggacttgattatcatagaaggatataaaaattatagatttaaaagattggaagtaactagaaaaggtaagtatgaggatattttatctaataagtctgatttgataggtattgtcagtgatatagaatataaattgaatattgaacagtttaatttaaatgattataaaaatatatcaaagtacatagagtcttgtataaaaaatgaaattttaagtataagcaatgttgaaataaaaaacatattaaaagaataattttaagatgttcttcttatataaaatgatataattatttatataaataaagatataagaaatttatcaattttattttgagttataaaatattaaagaaattgtaggaggacaatatatgaaaaaaatattagtagcatgtggagcaggaatcgcaacatcaacaatagtttgtgacagagtagaaagattggttaaagaaaataatatacacgcagaagttgagcaatgtaaaattgctgaatgttcaacaaaacaagaaggtgctgatttaatcgtatctactactatactaccaacaacttatgatatacctacaataaaggcaacaggatatataacaggtataaatacaacagcattagataaaaagatattaaatgcattgaagtagttttgtgtttataaaaaaaatttagtattaaatatagagttgtatctttataaaattttaaatatagagatatagctctttttatgctgtttcaagtatacaactatatgatataaatcttcaattttatgaaaaagattgttattactttgtaagtttataaaagatttaaagttattgttatgttatactaatttatgggtattttttagaagtactatatagaagtactaataaaggagggatttaatacttatgataaaacaatttgtcaaatattataagccatataagaaaatttttacactagaccttatagcagcttttctattttccttatgtgatttagtttatcctatgataactagaaatataatggatgacgttgttccaaataaaaacttaagaatgttagtagtttttgcagtagcacttatacttatatttatagcaaaagcagggcttaactattttatgcagtattggggacatgttattggtgtagatatgcaagctgatatgagaaatgaggtatttacacacttacaaagacttccaaatacgtattttgataataacaaatctggagtaactatgtctagaatagtaaatgatttaatggatataacagaacttgcacatcatggtcctgaagatttattcatttctatagtaatgttggttggttcattctttatacttatagatataaatattcctcttacgcttataatatttgctatattaccgtttataatttggtttgcaatagctaaaaaagataagatgaatattgcttttatgaagagtagagttactataggtgatgtaaatgctactttagaaaatagtatagcaggtatgaaagtaactaagtctttttgtactgagaaagaagagttaaataagtttgtaagaagcaataaattatttagaagagcaagacaagattcttataaggtaatggcagaatattactctggtatgaatttatacatggatatcttagagtgggtagttgtaatagctggtggttattttacttatataggaaaaattactttgggtgattttgctgcttatatactatatgtaaaaatgtttatacaacctatgaaaaaattaataaattttacagagcaatatcaaaatggtatgacaggttttaaaagattcatagagataatggaacaagaccatcaaaaagaagctaaaaatcctattgaacttgaaaatgtaaaaggtgacattgagatagaaaatatatctttcacatatgaagataagactcaagttttggataatttaagtttatctataaaagctggtaagactatagcattagttggaccttctggaggaggaaagactacattatgtaatctattgccaagattttatgaatttgataagggtgatataaaaattgatggaaagagtataaaagatgttagtttaaaatcattgagaaaaaatataggtatagttcaacaagatgtatttttatttacaggaactataagagataatattctttgtgggaaccctaatgctacagatgaagaaatgatagctgctgctaaaaaagctagaatacatgactttgtagagactttgccagatggatatgatacttatataggagaaagaggcgtaaaattatcaggtgggcaaaaacaaagaatttcaatttcaagaatctttttaaagaatcctccaataataatattggatgaggctacatctgctttagacaatgtaacagaaagagaaattcaagagtctttagaggaattaagtaaagatagaacaaatttagttgttgcacatagattgactactataaaaaatgctgatgaaatcatagtattgacggataaaggaattgaagaaagaggtactcatgaagagttagtaaacaaaaatggagtatatagtaggttacacaataactagtatacaaattttacaccatagctaacatacgcattaaacttacaaacataggatatattaagattcataaagacaattcattttatatttatgagatgttttatgaataaaatgtatcctatgttttattttttgcaaattacatttaattctctttgtaagaatagagttaaatagccaatggtcaggataacgtttttacaaaaagaataatttagaaaactaactttaatttatggaatttatcgaattttatgaaaaaaatcgaattttgacttgaaatgtttttcaaaagtagtaaaataatggataactatacatacattttataaaaatacatttattatgaggggggattttgtatggaggcaataacagctttttgtctagttttaatatcactgacgataggagatatagtttcagcaaaaactaaagcttttgttccgtcggtttttgtatcagcaattatatttatagtaggattctggacttttttcccagaaaatattgtggacttagccgctttaggaacaccattagctcaattaggtatgcttttgttaataactcatatgggaactatgatgagtattaaggaattagcaggtcaatggaaaacaatagtaatagccttggcaggaatagtaggaatatgtgtaggtgctttggcattagggacaatagtatttggatgggatacagcagtaatagctacacctcctcttactggagggctagttgcatctataatgatggcagatgctgctacagcaaaaggtcttgcaagtttatcagtacttgcaattttgatgtatgttgcacaaggatttgcgggttatcctattacagcattaatgcttaaaaaagaaggaaaaagacttttatcagactttagaagtggaaaagtaactgtaaatacagatgaagaaaaagttaaggatttacctgaacaaaaaagcagatttaagataattccagacttaccagaaaaatatgatacgacatatatgataatacttagattaggatttgtagcatggttagcagtacaatttacaaatcttacaaatgaagttgtatcaagatatgttatatgtttaatatttggtgtaatagcatcagaacttggaatagttgatagaaaaccacttaataaatctggttcatttggatggttaatgacatcattgatggcttttatatttgcaggattagcaaaagctacaccagcaatgcttgttgaaatggcagttcctcttgtaggaatcataatatttggtgtaataggtatgggaatattctctattatagtaggtaagcttttaggtgaaagtaaagaaatggctttttcagtttcgcttacatcactttatggttttccaccaaactatatattaactgaagaggcagtaaaggctttggctgaaacaccagaagaaaaagaatttttaatggataagatgcttccaaagatgcttgttggaggatttactacagttacaatagcttctgtagtaatagcaggtatctttgtaaatctaatatagtatttaagtgataaaaagtattttaaataagaagaatgtgtactacttggaggtatggaatggatattaaagaaataacaaagagttataaagactatgtaattaagcttagaagggaatttcatgaaaatcctgagaaaagtatggaagaagttagaacatcaaagagagttaaagaagaacttgataaaatagagataccatatgtatcagctggaggtacaggtgtaattgcaactataaaaggagctaatccaggaaagactgtagcacttaggggtgatatggatgctctacaagttgttgaatgcactgatgtagaatacaaatctaaaaatgaaggacttatgcatgcttgtggtcatgatggtcacacatcaatgcttctaggggcagcaaaagtgttaaatgatattaaggatagtatcaatggaactgtaaaattattttttcagccaggagaagaagttggtaaaggtgcaagagctatgattcaagatggtgctatggaaggtgtagatagtgtgtttggaatacatctttggactgatgtagaatctgggactatatcggtagaagaaggaccaagaatggcttctgccgatttctttaaaattactgtaaaaggtagaggtggtcatggttcacttcctcatcaaggtgttgatgcagtgcttgcaagttcagcaatagttatgaatctacaatctatggttagtagagaagtaagtcctctggaaccattagttgtgagtgttggagttttaaattctggaactagatttaacgtaattgcgagtgaagctgtcttagaaggtacaataaggctatttaatccagagcttagaaagcaaattcctggaattttagaacgtatagcaaaatctacagcagaagcatatagagcagatgctgaattagagtatgggtacttaacaccagcagttataaatgacaaagaatgttcaaagatagctacagatgcagcaattaagctatttggagaagactgtataacactatttgaaaaagtaacaggagcagaagatttagctgagtttatgaatatagcacctggtgcactagcatttgtaggagctagaaatgagtcaaaaggtgcttgctatcctcatcatcatggatgctttaatatagacgaagatgctctagaaattggaactgctttatatgtgcaatatgcagtggatttcttaaataaataattttaatatactataaagaaaaagcagagactaagtttatatctctgcttttttattgtgtatattttttataaatattgactatataaaatatatatgatagcataaagaaaatgataatcaatatcaattaaaaagaaggtgatttatttgaataatgtaatatttgcatttttgataacattattggctggtttatctactggtataggaagttgtatagcattttttgctaaaaaaacaaatactaagtttctttctataagcttaggattttctgctggtgttatgatttatgtttctatgatagaaatttttcctaaagcacaagatgctttgacaaaatctatgggagagaaattaggaagttggtcaactgtaatagctttttttataggtatggctatcattgctgttattgataagttaattccacaagaagaaaatccacatgaaataaagaaaatggagaatatagaagaaaagaatatcaaaaaaaataagtctcttttgagaacaggtatatttacagcaatggctatagcaattcacaattttcctgaaggattagctacatttatatcagctcttgatgatgttacaatagctatcccgatagcaattgcaattgcaatacacaatataccagaaggtatatctgtatctgtaccagtttattatgccacaggagataaaaagaaagctttttattattcctttttatctggtatgtctgagcctttaggagcgattattggatatgtacttcttagaaattttttaaatgatataactcttggaattgtatttgcaattgtaggaggaattatggtattcatatcactagatgaattattgccatcagctagagagtacggggaacatcatttatctatttatggattgattgcaggaatgggtgttatggctattagtttattactatttaaatagctttttaaatatatgattgtaacctaaaattagtatcaaaatgatataattatttaaatagatttttaagctatttaaaaatatcattttggagaatgagtgctatggaaaagaaaataaaattcaaatttgactggtatagttcacctgataagatagagaaatggttagaagatattgaagctaaaggatataatttatataagataaataaatttggaggaatattttattttcataagggaagtccaagaaaaataaaatacactgttgattactactatgatgtagagaataattattttgatgaacataaatcaaatggctggaatcttgtatttaggagtattggtagttttatgggtacatctgcatggtatatatggtcgaaagaatacaaagacatacctcctaaattatatagtgattctgataaaaaaaacaaagtaaagtcaattttatttatgaatatgtttatattctttatgttagtagtaatatttatatatttattgaatattgaaataagaaatttatatagtggttatggagcatctgtaactgctattgtactacagattatattgttgattttatatgcagtacaattatataggagattaatgtattatttaaggcttaaaaagtttaaataaataaaagaaggtgtcctaaaattatttttttaatattttaagacatcttcttttgttagtaaagtactgtttttaattatagtaatttctgtctttaaattgaaatatcaaataatagttgtattggattgagtattgataaaaataatttaaaaatgttatcctaaagtatcagatatacaaaattatctttaaatatattataaatattttaattgtattaactagaaattatgtaaggaggcattttatgattaagatagcagtttgtgaagatgaaaaagaaacacaacttttaatagaagattaccttgagaatatattaaaagatataagtatagaatatgagatacaaaagtatatatctggagaagagttactggaaagtaatttaaaagatatagatatattacttcttgatataaaaatggaaaaattaaatggaatggatactgcaagaaagattagagaagtagacgatgaaatggaaataatatttgtaacttcattaatagattatgtgcaagaaggttatgaggtaagagcttataggtatttactaaagccaatagagttggaagaactaaaaaaacatgtgctaacttgtatcaaagatattgaaataaataaggaaagtcatattacaataaaaaataagtctaatacatataagatttatttaaatgaaataaaatatatagaagttcaaaaaaaagatatgctaatacacacaataaacaagaattttgatataaaatatagtttaggtaaaatagaaaaagaattaaatccatataaatttataagatgccataaaagttttatagtaaatttaagatatgttgaaaatataaagcctaatgctgcaatactggaaagtggagaagaggtacctattagtagatatagatataaagaagttaaggagaaatttttaaaatttcttggtgatacaatatgctaaattttatgaatgagctattagtagttttatctatatttatacagttttctataatgaacggaattttaatttataaaaaggatagtaaaaaaaatgaaaaaatagtattctatattgtcttgtttcttatttatattataattcagataagtagattatttaatggaggaagttactttagtaatataaactatttattttatatattagcatttattgcttggggaggatactataattatttttataagatggattatattaagtattccattttcttttatctatttagtgtatattataaatgtttggatgctgttatatatagaatactattttttgcaattacaggtaatgttatttcatctaaagaatccttattagtacctcacttagaatctataaaaattcagatatatagtaatttaataattattcttatatatcttgtatttagcttttttaggaagtctataaaattaattagccaagataagagaaattatgtatatttattatttgccttattagctaatacaatgaatatgcttgtaaattatgtattaaaaaaattagaacggtttgggtcattacattcagaaggatactattttgataattttgttaatccaaagttggtaggagctagtagtatatttcttatattattgtttaaagaaataataaaagagaatagattaaaatctcaagctgaattaataaaaaataagttagatatgcaatatgcgcattatttaagtattcaagaatctcatatgcgagttaagaaactatatcacgatataaataaccacatttattgtatagacaaccttagaaacaatagcaaagaaattaatgaatatgttaacaatttaaaagatgaaataaaaacatttaaatatatctataatacaggaaatatgatattagacattataatcaacgaaaagagtgaaatatgtttaaaaaaaggaattaaatttacttgctctataaatttttcaaaagtaaattttgtaaaacctatagatgtgtcaagcatattttctaatattttggataatgcaatagaagcatgtgataaaatagtggatgaaaatattaataaatatattagaattaaaggaactataacaaagtcattttttgtacttaaatgtgaaaatagtaaactaaatcagcttacttttaataaaaatatattgttaacaaacaaaatggataagttcgtacatggaataggtattcagagtattaaatcttctttacaaaaatataatggagaattattatttgaaaatagtatcgataaatttatactaaatatatatataccattggagcaagatactgacagttggggcgattaagttaccagttgggacatatgtattgatacaaaaaaataaggatgttatcttttaataacaaaagataacatccttatttctgtattaaggagcttataattttactaatagtaagttataagaattggataggaaggtgatatgtattgaataataaatctttaatataaagaaaatataaatatattctaatgcaatgaataatactttagagcggttagtgtgatgggaggattgtgtatgaaagtaaaaaggaatataaatagagtggcaataattgtggctttaaatcttagcttagcattgatggcaggatgtatgtctcctgtatctgataagaacttaagtagctcagaacaaattagtaaagattcattgaaagaacaagttgaagataaaaaagatgaatctatcgagctatttaataattactcacaaaagattaatgatgcgaaaggtagagaagaagtaaaaaaagatttatctcaaagattttcgaaagctataatagacagtggttatagtattactgactcaaaatcagatggtagctttgtagtatctataaatggtgctgaaaaaccacctgaaaaaaatattcgaagtttattctattctatgtctgaagacgataaagaaggaaaagtaacaatagatattctctgtgctaaagagtatccagaagatgataagttatctgagagtgataaatatattaaatttatatacaatttatttaaatcattgactaatacgaacttaactgagaaagaaattttttctatggttgaagaagaatttaataagggagtaggtgttgtggagcttccttatatgaaggatatacatgttgaagttaacaaagttaaacaatcaactaaggttttaaaactaagtctagtatacaaatttgatatttcaaatcattagtatattagaaataactataacaatatagaaaatatatcatagaaaatttttttagattttataaatttaacaaaaaaagtattaatatataggtgttcaaggtagatgaaaaaaaaagttattttgcttccattttatgctaaaggacagtataatataattaaagtatgttataacatacaaaaatgtagtatatattatccaaagggggattttaaatgagtcaaactaatagaatagaagcatttagacaagaatatattaattctaaacctatgatatgttgtgaaagggctagaatttttacagaatcacataaaaaaactgagggagaagctatctgtataagaagagctaaagcttttttggagacatgtaaagaacttcctataaaaatctttgaaaatgaattaatagtaggtacagcaggaaaatttagaagaacagggatattgacaccagagttttcttggcaatgggtagacaaagaaatggatacttttgataaaagaactcaagacccatatgtaatatcaaaagaacaaatagaatttataagaaaagaaatatttccatattggaagggaaaatctttggaagaagttttcttagcaagaatcccagaagatacagctaagatattagtagatacaggaataatagataatgattctaagtggagacaggcagttggtgaagtaacaccagattatcaagatatattgtttgtaaaaggatataaagggattaaggaagatgcagataaaaaaattaaagaattagatatatcagtttcagaaaatattgaaaagatagatttttacaaatctgtttctatagttgcagagggtattatgacattggcacaaagatattcaaatcttgcaaaagagatgagtaagcaagaaacagatgaaaagagaaagttagaacttataaaaatttcagagatatgtatgaatgtaccagcaaaccctccaactaatttttatgaagcaatacaatttgtatggtttgttcaattaggtggtattctatcagaaaatccattggcattaaatttaggtagatttgaccaatatatgtatccatattatgaaaatgatgctagagaaggtaaaataactgaatcagaagctcaagaattgatagaagcactttggattaagttatcagaatgggtatggactatatcagcaaatacagcaaattactttgcaggatataatcaattccaaaatcttactgttggtggtaaaaagagaaatggtactgatggaacgaatgatatctcatatatgtgtttaaaggctacagaaagtgtaaaaactcaccagccaggattaagtgttagagtgagtcaaggagcaccagataatttcgtaatggcagttgctaaattggtaaaacaaggaactggtttccctgctatacacagcgatagtgcaggggcacaaatgttattacaagatggatatgatgcagaagatgctagagattggagtaactgtggttgtgtagttcctcattttagaaaaacaggacagtggacttcagccgtaaatatcaattttgcagcagctttagaatatgctatgaatgaaggtaagagtagattaactggagaaaaaatggggttagatacaaaaaatatcacagaatttacttcttttgaagaacttaaggatgagtttttaaagcaattagcatatcttgtaaaaagttctgttataggaactactgttgctcaacaaattcataaagaaatggtaccaagaccatttttatctacttgtgtagatggatgtttggataagggagttgatttaagtaaaggaggagcaaaatataatataggtcctgtattaactggtatagggttaggtgtagtttcaaattcattggcagctataaaaaaattagtatttgaggataaggtgactacgctagaagaattaacaaaagcactaaataatgattgggaaggttatgaagaattaagaaaacttgcgttggatgttcctaagtatggaaatgataatgattatgtagattcattagcaattgaagtttctgatttttattatactgaaactagaaaatacaaggatatttttggctctaaatttaatagtgcatttatgggtatatcaaactatgtaccaactggaaaaatcgtaggtgcaactccttgtggaagaaaagcgacaaaacctttgacagagggagtttctccgtttgttggtactgatacaacaagtccactagcagccatgaaatctgcatcaaaaataaatcatgatgttcatactggtggaacacttctaaatttaagactgaatcaagatttggtggaaactgaaagaggacttagaaatctaacatctatgattaaatcatattttgctttaggaggattccatgtacaatttaatacgatatcaaatgatactctattaaaagctcaagaaaatccagaagaatataaagatttattagtgagagttgctggatatagtactcaatttgttaatttatcaagagaaatgcaagatgctataatagctagaaattcacatagcaatttttaattatgaggtagattatgagtaaaaaaggtagagttgtaaaagtacaacatttttcagtaaatgatggagatggaataaggactactatatttttagaaggatgtaaattaaaatgtaagtggtgttctaatccagattcctggagtaacatagtaaaattaggtgttatgaaagataaatgtgtatcctgtaatagatgtatagatgtttgtcctcaaaatataagttcactatttgatagaacgcaaataaataataaatgtgatttatgtggagagtgtatcaaggtatgtcttaaagatgccatttgtataatgaccgaaaaaatgagtgttgaagaaatagtagaggaagttgaaaaggattttatatttttctttgaatctaatggagggataactttttctggaggtgaacctacacttcagattgattttttaagagaattagttgatattttttatgataaaggcataaatattgcaattgaaacttgtggatattttgattggaataaggtaaatgatgtatttgagaaaatagaccacatatttgtagatataaaatctatggatgataatattcataaagaatatacaggagtaagtaataaaattatattagataatatatgtaggctttcaaagttgaataaatctatggttataagagtgccaattatttatggagtaaatgatagtgaagaaaatataagaaatactgcattatttgtcaaacaaaatgttccaggaggcaagatggagttacttccatatcataaatttggaatcgataaatataaggcattagggcttgaagattatatatatgaatttgatgaaatttgtaacaatcatatgttaaaattaaaagagatagtagaacttacaggagtaaaaatcatagaatacaaatagctatcaggaggattttaacatggataataaatttcctaatgtgggagaaaatttaaggttattgagacaagaaatgggcataagtttagacaaagcttcaaagatgacaggtgtcagtaaagcaatgcttggacagattgagagaggtgaatcaagtccgacagtatctactttatggaaaatttcatctggatttaaaataaattttactacactattaaatgaaaatacaaatacctatgaggttataaagaaagaagaagtagagcctattgttgagcaaaaagggaacatgaagttatatccaatatacccttttagccctcaaagaaggtttgaactttttataattgagcttgaggaaaactgtactcatgtttcatctacacatagttatgttttagaagagtatgtactcgtaatagaaggtaaacttgaccttaatgtggatgggaaaacttatattttagagtctggacattctattaggtttgatggaactttagagcatatatataaaaatttaaataaaggaaaaactatatttcacaatatagaggtttatagataattttatagttatccttttctaaaataaatgaaaattttagaaaaggataacttatttttataatgtcgaaaagatttatatgtatgtgatgatgttattgttttaaaaaaaacataaaagcattataataatattaacaaaatagaataaagaggaagagaatatgattataaaggtttcaatgacagtattagtattaatattattgtatattctgtataagtatgaaactcagcatatagaaacgacagaatatactattttcaacaaaaaaattccaaaggaatttgataactttaaaatagttcaagtgagtgatttacataataaggtgtttgataaaaataataaggtattgatagataaaattgaatcattaaacccagatgttatatttataacaggagatttagtagatggagaaaataaaaattttcaagttgcattagatttaatagataatttggttgaaaaatatgaagtatatcatataattggaaatcatgaacaaaaatctttaataaaaaagtataaacatctatataaggattattttaaggaactatattcaaagaaaataataaatatggaaaatgaatctgtaagaatatatagaggtaatagccatcttaatttatatggtttaattataccattggaatgctatccatatttatttgctaataacaaaaaattagaactaagtgacaattttgtagaagacaatctaggtaaagttaatgaaaatgaatataacattcttttagcacatacaccatttttctttgaaaaatatgcaaaatggggagcagatttggttttagcaggacatgttcatggaggtataataagaataccttttgttggaggtgtattatctccaaatagagagttctttcctaagtatgactggggaaaatatgaaaaagataatagcactatgattttaaataaaggcttaggaggctcaaaagttttaattaggcttaattgtaaaccagagatagttaagattacattgaagtatgagaaataagattttatataacatatataaacatcaataacatataaataaggttgatgttaaatccatttaaacatatataatgaccaattttgaataattgttgaattaataaaaataaagtgctatttttagcatagaatatttaaactatgggggggagtaaagaatcatgggtgatacaagtagattttatgagtctgtaaaaaataaatatccgaaattaaaagatggaactagggttcatctgtggccaaaagaaaacattataattggtcctatttatgatgaagaagatggatataaaaaaagtatcggaaatgtggatagcttaagttggaagcaaattgttatactggctgaatgtgatgggaaaaatactactgacgatataataaatatattatccaatagatatagaaatatccataatatgaaagaaaaagttatggaattttttatgttttatgagaatgtatacttaacgtttgaagatgatatacagacactatcaagtgtatttgagataacaggaaataaatcatacattactcctttgtactttactatagaaatagatggagataataatacaaatgattatttttctgaaatcacaagtttattgaactgcatgtatgagaaaggctgtagatttatagaggttattggtgaggatattttaaaaaataaaagtatgagagaaatatttcaatatatgttagaccattttgatttaattgtggtaactaaagatagctttactattgatagaagcttaataaaagaattagataattatcgtcataaagtgatatggaaagtatattcaaaaaatgatgatacacgtattaaattaaaagaagatataaaaataaccagtttaataaaaaggggtcacactgtagtaagaggagacagagaaaaagcaataaaaatagaagatatgaggtttaaagatacaaaggagaggttttcaaaatatggagcagagtggagtcatttatatatttcttctgatggtagtgtaaaatcttattcatttcaaaaagataaaagagtctatttaggcaatatatttaacaattctgttgaagaaattttcttagagatgcaaaataaaattgacaaactagaaattgtgtatcaataagggtaaagtttaagatttatataagatttatagattgtttatttaagtttgtgtcaataattataatgaggtgaaatgacttgttaaaattattggacaaatttttttatgatgttttacttaaattttggctgtttatgatgctgtggatttttagagaactttttacaaatttcaaaatgactaaaaaatttaaatttcataaaatatttatgtaaaaatcatataaaattcatatagcatatgtatcatatgaggtgtagaaagactagcttaaaaaccataatataataccctattgtaatgataaccctccctcacatcctcaaatagagttatcattacaagaattaatccataaatttaaaatttatggtttttttttatttaatttgttttattatattagaatatgatttattatagaatatataataagtaatatagaatacattaattaagtttttgaaatgtaactatactaataaggaggagtatttatgaatgtaaataatcacaagtgcccagagtgtggtgaacatagtaaaaagtttgaaatagtagaggaaaatgaggattgtgtaatatttgaatgttacacttgtggaactatatctatattaaagtattgtgagaactgtaaagaatttgtatttgtaaatattccaaataatgtggagacatatgagtattgttgtggaaaatgtaataataaaatttaatataatataaacatatgtaatttcatatatcatttataccaatctcatataaaattcatatataaaatgtattatataaatataggaagaactagcttaaaacataatataattaccctaaatttataatgacaactctccctcacatcctcaaattatagttgtcattatagaataacttggctgtttcaaaaatgtgaaatcattttagaaacagcttatttttttataaaaataaagaaggcaacgggaagccttctttcgtgtaaaaaaagtttaattttttgttaagatttgtttgttattttatattacttttataatatgtttttatttggtggttggcaatggattttgcacaactggtcattattaatgtaaaagtggaatattattaataaataataattacaaaattgtaatctttatttattaaataaatgagtaaaataatatattaatgggtatataattaagacaatactagtttggggaggataaaattatggattataaaacaatcatattaaatagaaagtctgttagagaatataagaacatagatattaaagaagaatatcttagtgaaattaagaaatactcagaatcttgtaagaaactagttccagaaatagatgttgatgtaagaattatgaataaaagtgaagtttttaataatttagataaagtagcagggtacaaaggaaatatgatagattctccaagttatattataatattatctgacataaaagataattacattgaaaattcagggtacataggagaaagtataatctttaaagtaacagaacttggaattggttcttgttgggttacttttgaagatggaaaaaaggtaaaagaaaaacttggaattaattcagataaagaggtaacaggaattatagctattggatatggagaaaatgtaagtaatgctaaagtattaaatgctacaaaaactgggcaaaattattcaaaatctgatatgcaagttgtaacagataaggggtctactagactaggtgtagaagatgttgtttatatgaacgaatggggaaatgttgcaagtatagaaatcttagaagaaagagcacttcttgatgcatttcactatgcaagattagctccatctacattaaatagacaaccatggagatttatagttgatggaggcactgtagttttagctgttagaaaagatggtcatactaatttatatgaagaaaaaatagacattggtatagttatgctttattttgcaacaataataagtgcaactatgtttgatttaaaatggaatttaggtactccagacaaagattataaagtgccagaagactataagatagtaggatattgtaatatataagatagtttaatacttaatttaactacacttaaattaatttttataaaaagttcaataatattttataataaaatgttattgaacttttttattgtataatacaatttttatatttattgtattgattgaaaaatacttatgaatttaaatgcttacaattttgtgcatgaatagagaggtatattattttattaaactgtataatttgcttggaggtaatatcaaatggaatggataaataaattaaatcaagctattacttatattgaagaaaatctcgaaagtggagtggattatgcagaagcagcaaaaattgcatgttgttcaacctttcattttcaaagaatgttttcatatattgcagaagtaccattatctgaatatattagacgaagacgtatgactaaggctgcatttgaacttcagaacagtaacatcaaaattttagaactatctgagaagtatggttacgattcaccaacatcttttaatagagcttttcaaaatatacataacatttctccatctgcagctagagcaaagggtgttgttttaaaagcatatcctaagatgacattaagcatttatgtaaaaggaaatgtagaaatgcaatatcgtattgtagaaaagaaagggtttcgtattgttggtataaaagaaagtatgaacatgattgtagaagagtgctttgagaaagttcctaagttatgggctaaatgcataaaaaatggaacaattgataaactttcagagttaataaataacgaaccttgtggattgcttggagttagtgtgtgtacaaatagtaagggtttagattattatattgctgcaccaacagataagcctgtattagaagatactcgtgaatacttaataccatcaggtacatgggcagtatttgaatgtgtttctccaatgccaaatgctctggcaatacaggaattgcaaaaaagaattattactgagtggttaccaagttctgggtatgtgtatgctaacttaccagatattgaactttatcccaatggcgatatcaatgctcctgattatactacagaagtttggattccaattcagaaaccaagttaaagttaatgaataacattaaatttaataaacaacatgaaattttaaaattacaggctgaaaatagtctgttatttttttgtaaatatggaaagcaagctttacataaatgaaatatagttgtataattatggaaagtagactttccgtagttgagatattaaagggggatagatgtgaaaaatagattagaagaaataagaaaagaaagaggcataaaacaagaagaacttgcttctattttgcaagtatcaagacaaactataggttcattagaaaatggtaggtataatccttctatcatcttagcctttaagatagctagatactttgattaaaaaatagctacgcacacttgtgactttagtcatgagttagtagctaaaatagtcagcatatagggaaacttatatgtagagataggatagaacctatccaatactacttgaattgctaaaaacccctaaagctaaccaaactaaaacataaggatgaaataaacctaagtgtgaaagttacgaaagtagaaaaaattggttagatggtataaggttaaatcctaagtactttaaaatgggcaatcagcaggtaagctccgaataggagaaacttcaacgactattcctcttgagggaagtacactacaagctattggtagtggaagtgggtagaccttaacggataatgccgaaggataagatatagtctgtgcttacatgaaagtgtaagaagttcataagagaactgcataggtagtagcgaacttatgtgaacgacaacctcaaaaatgataaaagttaagacttacggttcttatatatgttatttaaaaataaatataaaaaaccttcaaaatacttgttttaagtaattgcatattttaatattatgataggtgatgaaaaatggaagttactcatggtagaggatatgcatataatatgtcaaatatagacatccagtattatggggagacatctttggaatcctagttatttcgttgctactgtatcagaaaatacagaggagcagataagaaaatatattaataatcagaaaaaacaagtaaagtgaggtggcagtagtggaaaaagcttataagtttagaatgtatccaaataaaaaacaacaagagttaattaacaaaacttttggatgttgtagatttgtatataataagtatcttgctaaaagaatagaagtttataaaaacgataaagaaacttttacttataaacagtgtagttctgatttgaccaatttaaaaaaagaattaaaatggcttaaggaacctgacaaattttcactacaaaacgccttaaaagatttagataatgcatataaaaaattctttaaagaaaaagcaggatttcctaaatttaaatcaaagaaaattaatagattttcatataaaactaactttacaaatggaaacattatgtattgtggtcaatatataaaactacctaaacttgatatggttaagataagggataaacaagtacctaaagggagaatacttaatgctactatatctaaagaaccaagtggtagatattatgtatcattatgctgtactgatgtagacattgaagcatttgaaaatactaacaatcaaataggtttagatttgggaattaaagaattttgtatctcaagttgtggagaatttatagaaaatcctaagtattttaagaagtcattaaacaaacttgctaaattacaaagagaattatcgagaaaaacaatcggtagtttaaatagaaataaagcaagattaaaagttgcaggacttcaagaacatatagctaatcaaagaaatgattttctacaaaaactatctactaaattaataaaagagaatgatattatttgcatagaagatttacaagtaaagaatatgattaaaaatcgtaaactatctcgcttaatttctgatgtatcatggtcagaatttattcatcaattaaaatacaaggctaattggtatggtagacaaattgtaaaagtaggcaaattctttgcaagttcacaaatatgcaataaatgtgggtataaaaacgaggaagttaaggacttaaatataagagaatggatttgtcctagttgtaatgaaactcatgatagagatataaatgcaagtataaatatattaaaagaaggattaagattaataacaattcaaaataaataacgtatgtaagaaccgtaggaactacggggatggcctgtggagaattagtaagacatattttagtatgcaaaattctgtgaagcaggaaccctgtgactttagtcatgggaggttcagatgagtattgaagaaatatttatttatgaggaggagtaaaaatgaaaaagaatatgttatatcttggaatagtatattttatttgtggaattttacttgttttattggctacgtttactgagttttcatttgaggcttttatttggggattatctggagctgctttaggtccaggtatatgtatgatttttcaatatatgtattggagtaagcctgaaagagcagtagattatgaagaaaagataaaaaaccaaaggatagagatgaatgatgaaagaagagttatgttacgtgataaagctggacgtatcactaatcaaatcatgtcctatgttcttgtaattcttatatttattgtttctatattgagtgtattttctgtaatggtaataagcaagtgggttttagttgttcttggattgcttattttatttcaatttatttgtagtgttgttgtatacaataaattagataaaaagttgtaataaaaagtttaaattcacaataaaaatattggatttttaaactttagattcttaagacagttttagaatatatctttatatacaattatataaatttataaaaagccataagtatacattgtattttgtggctttttgtggttaaagattatagatactttaaataaaaatactgcagtactttatttgaaagtaatttttatataaattcatattaatagtcttggatggtttcttttattaaaggttgcagtagataaagaattaattaagattgcatatcatataaattataaaattttttctcaaccaatttatcataaagataagtgatggtataagaatttttgtgattttatttttattgttaaagagatgtactaaattatcatatagattaggaattattgagaactattttttgtataaaaaggagctgattcaaattgttatgctattcccttgtcaatcatttcttgtatcattccagcaaatccaaagctattatacataaataaaactacattcgcattactgtttttaattatctcatcataggtcatatctatattttttatatatctaggatctagtatttcgagttccttaaaagtatcagccaacatccaagtcataggtgcttggtacgaatctctaaatataagggcctttttattagttaaagagcttgaatttctaatcttaagtatgtgacaatcacaacctctcatataagctccaccatagtcccattctcttttatcttttaattttgcttttatgatattttcattaatctcagtatttttagtaccattactaataaaatatttgtaatttgcatcacttatttcaacatagcttatagactcttttttcttaagtggatatcccatctttttattataactacctataaagaccttgtcatttacatatcgagtactgtatctttttaaatgactatctatttctgatttagataagccaaggtctaatttatcaagaataaacttatattcttcaaatgctcctaatgaatttccgtgatggtctgtttttaaaaagaatttttctctctctttttcggtaaaacttctataaaagtaatcatctatatctaagaaatttatgtctgttaactgcttttctaagttttctttgttaatatctatattatttttaccttctataccacttggatacaagtgcttaagcatatttgtcttatgaggaagtgaaacaaagtaaaaatctttttttctatttaacttactcaagttattaatggctttggagtaagattttatatgataatcagataataatttagcaaagttgcctaatagccatccatctttagttagataatacttttgtttaatctttttattttgactctgcataatatggacattaaaaacttctttcattgtaatataattttggttattattaaagataattaagaccatcaataatatcactgatactataggtagactatgtcttttgttcaatatgctacatctccttacttttattttgattagtttatttttaccaaagcaataaaaaataaacaataaaaagcctctattaaattttgaatttaatagaggctttttatttactactttattcctttatctatcattgaatctatcattgaatcaaacccagaactattatacataaacattacaatatctgcattactttcctcgattatctctttgtatgttttatatattgagtttatatttctagggtctgctatctctacttctttaaacatatcagcaaataaaagtgttgtaggagcctgatatgaatctctaaatattagtatttttttatctactaatgctttagggttttttatagttaatatattagttttagctcctctaatgtatgcaccaccataatcccactctttattatctctttcagttgcataaacttctttttcttctttttcttctttttcttctccatttatatcaaagctataatcttggttatcttttgtcatataaactacatattcattttctttaattagcatatctatattttgattataacttcctataaatttcttatcagtaattatagactttttatagctactaaaatgcttgtctaaatcttgcttagatagacctaagtccatatttgatgccatcattttaaagccttcaaatgctccatatccagtccaatgatggtcagttttaaaatataaattttctctttctttatctgaatagttacttaaaaaatactcatccatatctatatatttaattaaatctggatttaatctatttttaaaattctttaaatttatgtctatattatccatattatcaacatatttaggatacaaatgttttaacatattagttttatgtggcatcattgtaaaatacacattttttcccatatctttacttagattagataaataattaatggatttttcgtatcgacttaattgtttttggtctaaaatttctggaaacatacctaatatccagttatcttttcctagataatagttacctaccttagttttatttaaattagcctgagtccttgtatttattgatatcatttcatctctaaatgcaaaatggtcattaaaatattcttcaaacttggctataaagtcacatttttttaaattttctacagtcggaaattttgcaagatttctattttcagttatacttaattttttctttggaagtgtgaagtttagtatgaaaaatccaaatactataattaaaaatgaaatggcaacaatccttggtttttttttactcatgtttatacctcccaattagaatctaaaatataagaatggattataggttgagctacttaacattattattacaataaacatacaagaaacaatgaaaaccacattagtaacttgatataatgtgctatttaatgtatttttatttttcttaattaataatgattttacaacttttacaataggagttgatagaaggattgccccaacaattatataccaatattcaattataaatacattgaatgcatcactgataaccggataatttccagcaccaaacataatacctataaatttaatagctgctggtaaatcatcaactctaaaaaatacccatccaatcatgactataagaagtagatatatgtgtcttacaattcttggcatcttatatagaaatttttctaagaatgctttttctactgatattaatattccataatatagaccccatataataaaagtccaactagctccatgccacatcccggttaaaaaccatactacaaatagatttctatatagttttgccttagagactctacttccacctaatgggaagtacacatagtctttaaaccaagtacctaaagatatatgccatcttctccaaaactcagatactgtttgagagatatatggatagttgaaattttctaaaaactcaaatccaaacatcttacctaaaccaatggccatatcactatagccactaaagtcatagaatatttgaagtgtatagcaaactatacctagccatacctcaagtcttgataaatctccagctgacttattaaatacaccatctgcgattacacctaattgatttgctagaattactttttttccaagaccaacaacaaatctgtttacaccttgagtaaatttgtcccaattgtgttctctatactcaatgctatctgcaacagtctgatatctaacaataggacctgctacaagctgagggaataaacttatgtataatgctaaattagctaattttctttgaactttagcatcatttctatatacatctattacatagctcattatttggaatgtgaaaaatgagatacctaaaggtaatttaacctcaggtatagttatatctgtattgaataaaaaattaatattatctataaaaaaattgctatacttaaatacagcaagaatagatatattgtaaataacagaaagcacaacccacatttttttatttttactgccagaaactttaataccaaatatatagtttactattattgatagtatcatcaaaaaaatatattttggttctccccatgcgtagaatgcaatacttgctagaagtaacataacatttttatacttaggatttgccaagtaatagcaaatgagtgtgactggaaagaataaaaataaaaatattaaactactgaatatcatattagactcctttcttaaccaaatcaattatatctttatctaaaatatatagcaaagtaagtattttcaagttttaagtacttaattgtatgaatttatatgtgtttttacaagtttaattaatctatatgtaaattttgacttttcatataatttttttaaaatgatgtaatattaaaatgaattaataaagctattataataaagaaaaatcaaggacatattacttaactatatgtgtttacctttgattgtgcctctatacagtctattaagatagatgttgtttatatctataactgtaaaaagaactctttattaagtattagaatcagaatactttcagatatgcttttatcgcaagtttgttttaaatgacaaatactttaaaataatatcgaatcattatactaaataattatgattgattataaattttattttaattattgcttccatagtttccatttgttgtaaaaaagttactatttgttgaaattggtatattttttagatattatctatgtctaataattaaatttataaatatttctttattttttatattaggatatttttgagaaatgaaatacatcttaatttactttggtatgaatatttttatggatattttatcacaaaaaaataacccttttacaactaagggttactttttttctttattttttcttattatatcattattttttgtttatttcaatattttgatattttatccattatagtgaaaatatatcttgagcttttcagattttataaactttacaaaatatacttaaaattaacacattttatttacattgtattacacttaattcttatttttatcattccacaaataaaaaagaataagataataaataaaatacttatcaccttattctttatttaattattttacaatgaaaaatctaaactactttttaaatagcttcctcttccattaatttatttgtatattactgatttaactcttcaagtaactaattgattgttgcaacactttatcctaaactctagaaactttataaactacatctctagcatttggtaaatttccatctggaacacctacagcaataccaaatggtacagaataaccttctagtatatcaagtagttctctgtattttttatttgtatcaaaatttttagagattgggaaaaaatcaatatgataagaagtatggatttattaagtgaatacataaaaaatcctactttgtttagatatattttaggagttcaagaagttatgactatggtatttatacttatacaaggctagaaataaagatgaaagaatattacaataaaaaaactctttagtatatactaaagagttttttttattggtgccgctgatgggactcgaacccatatggtttcccgtacgattttgagtcgtatgcgtatgccagttccgccacagcggcttatattttaaatccaaactacttgtatatcctaccagattttccaagaatatgcaagaggaatattgaatacaaaatactcatcaaactgtaaaacattataaaaacttatgaatcaacacagttgattttgaatccattgtatttaccaattcaaccattcgggcatgtcatgtatattattatagcaaaaaaatatattgtttgcaacatatttaattttaatatactattattattatgggaatattaaataacactatattggtatataatatatatgttacaaaaatagataatttttaggagtgatataatttggaaaaaaaattaattataatagatggaaattcaataataaacagagccttttatgctctgccagaaatgaataataaagaagggttaaagaccaatgcaatatatggatttacaacaatgctatttaaaatgatagatatatataaaccaacacatataagtgtagcctttgacagaaaagcacctacatttagacatttagaatataaagagtataaggctggaagaaagggaatgccagatgaactggcagaacaattacagccattaaaagaccttttagataaattcaaaataaatagattggaaatagatgggtatgaggcagacgacattataggaactgtttctaaaaaagcagaaaataatgggtataaggtatacatagtaactggagacaaagatgctattcaacttgcttcagataatacaactactcttataacaaaaaaaggagttggagaagttgaagaatacaactttaattctgtaattgaaaaatacgagatgactccagcacaatttattgatttaaaaggtcttatgggagataagtcagataatatacctggagtacctggaatcggtgaaaaaacaggtataaagcttataaaagagttttctagtatagagaatttaatagagaatacagataagcttaaaggtagtgtaaaaaagaaaatagaggaaaataaagaaatagctattcaaagtaaaagacttgcaacaattataagagatgtgccaatagaagtggatttagatagtatggtttttggcgattatgataaagatgaacttttagataaatttagatactttggatttacaagtctcttatcaagattagttgatttggtcgattcagatgacacagaacacgtagaagaaaaaatagaaatattaaaattaaaagatacagaaaaatttatagatgaagtaaacaaaaaaggacaagttattttaaaaactgttagaggacaaggtaatatacttgaaaaaaatataatatatatttttataagtgtagatggagaaaaaatatattatgtagattcaaatgaagtgtcaaagttagatagtatattttcaaataatgaaattaaaaagtatggatataatttaaaagatgattatatatctttaaaaccatataatataaacttagaaaatatgtattttgatataacaatagctgagtacttaatagattcaacttcatctacctcatatgattgtagtgcaatagctatgaagtatttatcaaaaaaggttaaatcaaaagaagaattattaggaaagggtgttaaatctaaaaactatgaggatttagaatttgaggatttagcagagtatatgggtcaaataatatgcacagttaaagaaacaattcctatgatggaaagaagtctaatggatatgagtatggatggtcttttttatcatgtagagatgcctttagtagaagtcttaggtcatatggagtatgaaggtataaaagtagacaaaagtatattggatgaattgagtgtagagtttaaagaaataatagctacactagaaaaggaaatttatgaattatcaggagagccattcaatataaattcaccaaaacaattgggtgttatattatttgaaaaattagagcttccaataattaaaaaaactaaaactggatattcaactaatgcagatgttttagaaaaattaagagataagcatccaataatagataagataactgagtatagacaaatagtaaagttaaattctacttacgttgaaggacttttaaatataataaatccagaaagtaatagaatacattcatcatttaatcaaactataacgactacaggaagaatttcatctacagaaccaaatcttcaaaatatacctataaaaatggaaatgggtagaaaaataagaaaagtgtttattgcagatgataactgtaagttggttgatgccgattactcacaagtagagctaagagttcttgcacatatgagtcaggatgaaaatatgatagaagcatttaaacatcatgaagatattcataccaaaacagcttcacaagtttttaatgttcctatggaagatgttactagtgaattgagaggtgcagctaaagctgtaaactttggtattatatatggtaaaagtgactttggtctagctgatgatttaaatatacctgttccaaaggcgaaagaatatatcgaaagttattttgctaaataccataaaataaaagagtttatggacacaacagtagaaaaggctagtgaggatggatatgctgtaacaattttaaacagaagaagatatataccagaaataaagtcaagcaattttatggaaagaaatagaggaaagagatttgcaatgaatgcaccaatacaaggaagtgcagcagatataataaaaattgctatgataaatgttcataaaaaattggaagagaacaatttgaaatcaaaacttatactacaagttcacgacgagttgatagttgaagcaattgatgatgaaatagatatagttaagaaaatagtaaaagaagaaatggaaaatgctgtaaatatggatgttcacttagatgtagatttaaatgtaggtagttcttggtatgagacaaagtaggtgattttatgttgatattaggacttacaggaggaataggctgtggaaaaagcagcctatcaaatatatttagaaatcttaatatttctatagtggatgctgatattatatccaggaagatatttgaggataagttgttattggaaaaagtatttgtccattttgggcaaagtataaaaaatgatgatggaactctaaatagaaaagctcttgggaaaatagtttttagcgatgaagaaaaacttaaggaattaaatagcttgactcatccgcgaataagagaaaaaataataagtgaaatagaagaattgagaaaaaaaggcgaaaatatagtagtattagatgcagcaatattggtagaaagtggttttttagatatggttgacaagctattagtagttacttgcaaacaagaagtacaaattagtagaatacaaaagagagataattgtagtaagcaggaagcacttagtaggataaattcacagatgagtcaggaagaaaaatccaaatatggtgattatataatagataattcgggaacaataactgaattagaaagtaaagcacataaatttattgagtacatgaaggagaattggcgtgaatagtaagaaagtattgattctatctatttttataatcttatttggggcactattaatggaaagcaaagtaatacataaatttttatatcctaaaaaatattcagagtatgtagaaaagtattcaaaagaatttaatttagatgaaaatatagtttacagtgttattaaagccgaaagtaagtttaatagttctgctgtttcaaaaaaggaagcaaaaggattaatgcaaatattagatataactagagattggggagcagaggaactaaatttaaaaaatgtggatattttcgacccagagactaatataagacttggctgttggtatttaagtaagttatacaaagaatttggtaaattagatttagtgatagctgcatataatggtggttcaggtaatgtgaaaaaatggttagaaaataatgaatatagtaaagatggcgaaaatctacatgatataccttttaagcaaacttcaaaatatgtagaaaaagtaaaaaataattacgaacattataataagatatatggcaagaaaggaaaaaactaatgaagagaataaaagtcttaacagtcgttttagctataactcttatggtagctggttgtagtaatactaaaacaaaacaaagtagtagtgattcaagtttacaaagtcaaagttctatagatgctaagtatataaacttaacaatggtaactccaaaaactataaatcctataactaatactgataagtctgttggttatataatgaatttagtttatgatagtttatttactatagatgagaactacaatgtaattcctcaattagttaaggagtataatatagctcaggatggaatgagtatagatataaagctaaaagatgcaaagtggcatgatggaaaaaatgttacttcaaatgatgtaaactatactattggtttaattcaaaaaagtgcagatagtccatataatgaatttactaaaaatatagcttctgtgaatattaaatcagataaagattttacaataaaatttaaagctagatatgctttttcaattgatagtttaatttttccaatcgtatctcaaaatcatttagattcaaaggatgtaaatgacaagaataataatatgataggaaatgggaaatataaaatagaatcatatacagaaagagaaggaatggttttatctgtaaacaaagattactatgaagaagttccaaagaccatgaagaacataaaagtaggtatggtgcctaatgaagaggcaaggacatctatggttatggctcttgatagtgatataaccaatgttacattaaatgatttaagcaagtttcaagaaaaagagtttaatataacaaaatatcaaggaagagattatgagtgtgtattatttaattataataatccattttttaaagatgttaattttagaaaagcaattgctcactctatagataaagatagaattattagtgaaggttatatggatgatgctactccagttaattttccacttaattcaaaatcaaaatactataatagtgaaatgaaggatttagagtttaataaagataaggcgatagagtgtcttgctaaggtagaatatgcaaatataaactcagtaaatcaaaatgacaataaagtaaaaaatcagaaaaaatcagctaaaaagaactcaaagaagcttacgccagaagaagaagcaaaagctaaaaaagcagaagaagatagaatcaaaaaagaagctgaaaagaaaaaaaatagagaaaaagaggaagtaaagaaaagtctttctgaaatgaacttaaagataatagtaaacagagataatagtgagagaataaaaactgcaaacataataaatgaaaacttaaaagctataggaataaatagtacagtaaatcagctgtcagataaggatatggaaaatgctcttaattctaaaaattatgatttagcattagttggatggaaactatcaattataccagatgcaagtagtattatagcaagtagtggatatactgatgataagctaaatggatatatgtctgcacttacaagttctacgtctgaaattgaaacaaaaaaagcatacaaagatgtacagacatatataaaagataatgcaacatttataagtttagctgtgagaaacaactatattgtaagtaatagtagattaaaaggtaaaattactccaaatgattttgatgtatatgagggaatatctaatttagatataaaatcgaatgaatcaaattaaatgattaatttctatttaaaaagtataaactatatgatagaatacccttatggggtataaggaggtaattaaatgaagaagaaactattagtagaaggtatgagttgtggtcattgtgtaaaccatcttaaaactgcattaacagaagatatagatggtattgaagttttagatgtggatttagaaaataagtgtgcatctgtagatatgaaagatgatatatctattgaaaaattaaaagaagtgatagcagaattaggatttgaactaaagggaattgaatagaaattgataaactaaaaaaaggcctctattgggggagtaatagaggtctaaaaatgggggagattgagtatgtttgattttacattactattatctccccttttaaattaatatatacataaaaagtaaaaaaattttgtaatgactcacatttcttgagctttttgaatatactataaatagctaagggagggagtatcatggaatctaggggatataaagaggatttaaaaaaaatgatacttgatatggcccacaaagaacttgagagttatgtatcacaaaaaggagcaaaaaaatactttgaaggtaacttggataagattattaataataatataaaaaaattcaatcaaagtattggtcttaatagagtatatttaaaaatgttaaaaaagtgtgcatatcaagaaagtgtaacttcaatatcaaggactataaagaaagaagcattatttaaatcaaaaaaagagctatttgctttttcagagtacttaaaacttgatattaacaagcgactttcatataatcaaattttaagaaaaatatcaagatatatatactataatagaagttcatatgctcaaaaatacgttgttttcaaaagaggagatgaagaatatcttttagaaccagagaaaataaaagatgaattaatatcaagctataggtcaaagactagagaagatatgaggtcaatagcaaaacttttggatatagaagtagaagatgattataatgctgaagatattagaaaaaaagtaataaattatattatcaaagaaaaacttaaaagttagagttttaaagaataagttctgccaatttgcatgattaagtataacttgggtataaattttttgtgcatttgaaagagcttattctttttttgacatattcttttaaataatttaccaccatttggtaattggtcatcatcattcaaatttttaacttaatatgatttaaataaatttataataatgatataatataaaaaaaataaaaattggagagtgatttcaaaatgaagtttaatttttgccataacaatttcaatgttactaacttagaaaaaagtttagatttttataaaaaagctttagggcttaaagaggtaaagcgtaaggaagcagaagatggaagttttatattagtttatttaggagatggtattactagtcatacattagaattaacttggcttagagattgggacagaccatataatttaggagacaatgaatttcatctggctttagaagttgaggagtttgatgaggcaaaaaaacttcataaagatttagattgcatatgttttgaaaatgaaagtatgggaatttattttatagcggacccagataattattggattgaaatacttcctaaaaatcattaattttaaggatatgtttataatttctttacaattaataagagaataagttatcattaaattgtagggactaaaaatggataataatgttatgaatttatgactataaaaatttgttggggggagtgatagtagtgaagaaagctatagcagctttaggaattggggcagtagcagtatctgttagctccataaatgcaagtgctcttgaaaagggaacagtaacagcaagtgccttgaatataagaagtggaccaagttctgattgtgataaggtagcaaaattatacaagggaaaaactgtagagattttagaaaagtctaatggatggtataaagtaagggtatcgagttctgttgttggatggggaagcgcaaaatacatatcaacaagtggttcatctgaaggtacatcaaatcaaaataatccaacttcaagtgggacaactattagtggaaatggtaaagtaaatgtgagttctagactgaatgtaagaagtggtgcaggtactaactattcattagttggtaaagcaaataatggagatgtagtaaagttactagaacaaagcaatggatggtataaaataaaactatcaaatggagttactggatgggctagtagccaatatatctctaaaacatcagaggatgttggaacgaataattctagtaattcaaatagtactaataattctgataaaaaaccatctagcgaagaatcaattgaaggcaagaatggtaaggtaacatctgctgtgagtttaaatgtaagaagtggtcctgggacaagctattctataataggaaaattaaatggtggagatgttgttgaattaaaatccaaaaataatggttggtataaggtaaagttatcgagtggaacaattggatgggtgagtgccagttatatttctgagactaatgaaggtacaaaagaaaaaccaaattcatcatctaaccaaaattctcaatctaatagtaactcaaagccatcatttactggaaattcagataaatctacagcaaaaggttcaacaatcgtagattttgcatatactcttattggaataccatatcaatggggagcttcaggacctgataaatttgactgttctggatttacacagtatgtttttaaacattctgtaggcgtttctattcctagagtttctagagaacaggctaattttggaagtgcaatttctatggggaattatgcaccaggagatttagtttattttgacactgatggtgatggaacaactaatcatgtaggtatatatgtaggaaatagtaaatttatccattgtagtggtactcagactaatcctaataaggttaaagtggataatttaactagttcatattggtctaaagtattacttggtgcaagaagatttgtttagtaagtacaatttcttattaaaaaattagaagaaataattatttatattcataaattgtgactcttaaaaatatactttattaataatataattttgggagggacaaactaatgaatagaagaaaaacgatatacagaggatttaataataatagacataagattgatttacgtaaatatgttataacgattgcttgcttgtgtctaattggctattattcttatacaaaaataaaagatagcaagatattggagtatgtatcggctaaaataccatttctaaataattcatcagatataacttataaagatatatctgatgaattaaattcaataaaaaaagggaaaaaatctaaatcacaaaccaattcagatgataaacaagaaactaatccagaaaaagcggtaaataacactaaagagccagaagaagtcaaattagctactatagaaggctgggatatgtacactattcaagttgctgcaatagataataatgatgatttgaaaaaaatacagacatcattagttaataatgacatacctttttcagttatggagaaggatggagtaaaaaaaatacagacctattcctcttttgatgaaaatgatgttagaaagcagataagcagtgtaagaaaggtgtttccagatgcatttttatcacacttagatgcacctatgttgtctttagagtatacaagtaactacgcttatatagagagtatatctaaagaattaaataaattaataacaaactttaaagaagaatcaagtttttggtcgaatgctgaaaataatgtagatatggaaaaatataatactattttgacaaatagaaaggcaatatcacaaaatatatcaaaagaagctgaaaagattgactattctgaaatgcgtttatttaaagataatttaatagagtatgtaaagaatgtgaatgaaaaaattgatacagcttcaaaagcagcaaatgaagaaaaatatagtgtaagtaaaagtctgcttttatcatccatgcaggagtactctatgtttataaattctataaaataaaatacagaaaatttggactttagaaagctatatgaaaaggattgtttaattaagcaatccttttcctcagtttgacttaatatagaggtattgatttataaaataaattataaaaatacggatatttttttaacaattgttaagattttttaatatatatagtatacttatagaaggcagaaaaaatgtttttttatagataagggggtaaaacaatgaaactcttaacttttaagggagggatacatcctccatatagaaaagagtactctaacacaaaggcacttgaaaaagctcaagctccaaagatagtttacattcctcttcagcaacatataggggcaccagctaaacctattgttgaagttggtgatgaagtaaagtttgggcaaaaaataggtgaacaacaaggttttgtttcatgtaacgttcattcttcagtatcaggtaaagttattgctattgaacaacatgaagtaccaggaggttcagctcaatgtgtagttatcgaaaatgactttaaggaagaattacatgagagtgttcaaccaaaaggtcagttagaggatttgagcaaagaagatatagtaggtatcataaaagaggcaggaatagtaggtatgggtggagctacattccctaaccatgtaaaagtatctcctccaccagatagcaaggcagaagtagttatattaaatggtgcagaatgtgaaccatacttaactgcagaccacagattaatggttgaaaatccagaagatgttgtgtttggtttaagagcattaatgaaggtattagatgtcaaaaaaggatttataggaattgaaacgaataaaccagatgctatagaagcaattcaaaatgtagctaaagactatagtgaaatcgaagttgttggccttcaagtgaaatatccacaaggagcagagaaacaacttatttatgcgtgtacaggcaaagaagttccatctggtggattaccaatagcagcaggtgcagttgttgacaatgttgccacagcagcacaaatagctaagtctattaaaacaggtatgcctttggttgaaagaatcactacaataacaggtagttgcatcaaagagccaaagaacctaataacaaaagttggaacattagtttcagaaataatagaacaatgtggtggatttaaagaagataagaagattggtaaggttataatgggtggacctatgatgggaatagctcaatatactactgaaatagcgactaacaaaggttcttcaggaattttatgcttggatgaggaagaatcacgtactccagatattcaaaactgtttaagatgtggaagatgtacagatgtatgtccatcattcttacaaccacttttcataagtgcatattctttaaaagatgactatgacacagctgaatatcatagagcaatggattgtatagaatgtgggtcttgttcatttatttgtccagcaagaagaccattacttcaatctataagatcagcaaagagagaaataggagcaaagagaagaaagcaagctgctcagaaataaagaaagttaagggggaaaaacgatggaaaataagttgatagtatcatcttctcctcatgtgagaagtaatgaagatacttcatatataatgaaacaagttattatagcactccttccagcagcagtagcaggagtatacttctttagacttaatgctttgagtgctatgtttttttgtatacttggtacagtaggtactgaatttttatatcaaaaatttacgaagcaaaaaagtactataggagatttttcagctgttgtaacaggattattattagcatttaacgtaccagcatcacttccttggtggatgtgtctagtaggaggaatatttgcaatattagtagttaaaatggtatttggtggaattggatgtaactttgtcaatccagcacttgctgcaagagcatttttattagcatcattcccagtagcaatgactgcttggactcaaccaggtgttaactggataggtaaaaatttagatgcagttactacagcaactccattaagctttttgaaaaatggagcagcaggactggcagacctttctagcaatggaattagtcttgctgacatgatgatagggaatattggtggatgtataggtgagacatcagcaatattattattattaggtggagtatacctaatgtataaaggcataataaattatgttataccagtattttacatagcaactgtatttatattaacattccttttaggtggatttaatataactttcgcaatatatcaactgtttgctggaggacttatgttaggtggattcttcatgcttacggattatacaacttcgcctatgactaaaaaaggtcaaataatatacgctgtattagctggtcttataacaactgttataagaatgtatggtggatatccagaaggtgtatcttactcaatactattagtgaactgtcttgctccacttatagataagtttgttagaaatagagtatttggggaggtggctaaataatgaacagtatggtgagattaggtggtactttacttgctataagtgcaatagctgcattagctcttggagctactaatcaggttacagctccagtaatagaacaaagaaatatacaagaaaataatgaacttagaaaagcagtccttccagaagcaaaagaatttaaagaaatggataaaagtacatataaagaccttggagatggtcttatagctgaagtgtatgaaggtttagatggttctgaagtggttggatatactttaaaagctaaaccaagtggatatggtggagaaattgaagttatggtaggtatatcatctgaaggtcaagttacaggtgttgacattggtaatatgtcagaaacagcaggtcttggagcaaaagctaaggatgatgcatttaagggtcaatacaaaggaaaaactgctgagcctcttgaagtagcaaaaggaagtacaacagcagataatcaaatattagcaatatcaggtgcaactattacatctacagcagttactacaggagtaaatgctgctatagatgttttcaatagtgctcttaataaataaggagggttaattatgaatttagctaaagtatttaaaaatgggctaatagatgagaacccaacatttgttcaagttataggtatgtgtccaacactagccgttacaacttcagcaataaatggaattggtatgggtctttcaacagcagcagttttaatatgtgcaaatttagttatatctttaataagaaaaattacaccagataagataagaatacctatatttatagtagttatagctacatttgttacaatagtaggtatgcttttaaaagcatatgttcctgctcttgataaggctcttggtatatatataccattaatagttgttaactgtttaatattagctcgtgcagaaagttttgctttcaaaacaggagctatgccttcaatagttgatggtgtaggtcaaggtcttggatttactgttgcacttacaataataggtgcagtaagagaattacttggaaatggtagtttatttggaatgacattatttggagcatctttccaaccagtattaatatttatattaccaccaggtgcattcttaacattaggattcttatttgcaggatttaataaattaagaagtaaaaaagcatagtggaggtgtaataaatgaatttaatacttttatttttaagtatcgttcttgttaataacgttataacatctcaattcttgggtatatgtcctttcttgggagtttctaagaaggttgatacagcagtagggatgggagttgcggttacgttcgttttaactctagcttcaattataacttattttatacagattttattagtaaaaactggaactggattcttacaaacaatagcttttatattggttatagcttctatagttcagttcgttgaaatggtaattcaaaagatgagtccatctttatatcaagcattaggagtttatttacctcttataactacaaactgtgcagttcttggtatagctctagttaatgttcaaaaaagttataatttagtagaaacaataataaatggatttggagccggagctggatttactttagcaatagtaatattcgcaggtataagagaaagactagagttagctgatataccagaagcatttaaaggtttccctataacgcttatatcagcaggtttaatgtcaatagctttcttaggatttacaggacttataaagctataaaaaagaggggtgaaaatggtgatacttacagctgtattagttttaggaattatgggcttaatcttcgggatagtactagatttcgcatctaaaaagtttgctgtagaagtagacgagagagtggaagctatactaggagtacttccaggagccaactgtggaggttgtggatttccaggttgtggaggtcttgcaaatgcgatagttgaaggcaatgcaccagttaatggttgccctgtaggtggagcagatgttggtgcaaaagttggagaaataatgggaataagtgctgaagcaggtgagaaacaagtagcaaaagttatttgtaaaggaacttgttcaagtgcaaaagataaatatgagtatgaaggaatatcagattgtagagcagcaaatgttttaaactcaggtgctaagatgtgtaaatttggatgtttaggtcttggaacatgtaaggatgcttgtaaatttgatgctatttctatagttgatggaatagcagtaatagatgaagaaaagtgtgtaaattgtggaaaatgtaaagaagtttgtcctaagggtataataatcacaaaaccagaaagtcaagaagtagttgtagagtgtaatagcaaagagtttggtaaagctgttaaggaaaaatgtactgctggatgtattggctgtggaatgtgtgtaaaagcttgtaaatttgatgcaataatatttgaagacaaaatagctaagatagaccctaataagtgtgtagggtgtatgcaatgtgtagcaaaatgccctacaaaagtaatatcaggtgacataactaagaaaaagaaagttactattgaccaagaactttgtgttggatgtacagtgtgcaaaaaacaatgtaagtttgatgcaatagagggagaattaaaagaaaaacataaggtagatgcagataaatgtgtaggatgccatttatgtatggaaaaatgtccaaagaaagctattaaaattttgtaatatggacaaaataaggatatggaataatttccatatctctaatgagtacataaaacagaggtatggaataatttccatacctctattttatgtatatttattctaatggtaataaatataacaatagtgtaacaaaaaaggttcgacatttctgttgaattttttacaatatagtgatagactaaataggtacaaattacgtacaaatgaggtgaataaatgaatataatcttggcatcagcctctccaagaaggaaagaaattctagagaatacgaatgtaagatttgatataattaaaaatgaaattgatgagattatattggaaggtgaaacaccaaaacatttagttatgagattagcttttgaaaaaagtatgtctgtagcatctgaacataatgaagatgttgttattggagctgatacagttgttgttttagacaatgctattttaggaaaaccaaaagatgagtcttgtgcaagagatatgttaaaaagactatctggaagagagcatcaagtcataacaggtattagcttaataaacttgtgcgaagataaaaaggtaattgactatgtaatcagcaatgtgaaatttaaaacgttatcagagcaggatattgaggattatctgaaaactaatgagtcatttgacaaagcaggagcctatggtatacagggttatggagctttgttagttgaagaaattagaggagattattttaatatagttggtcttccaatttcaaggttaggcgacctattaaaaaaatattttagtataaatcttttttatggagtgtgatttatctgaaaaagtcatttaattcaaccattaaggtaaaagaaatggcaccagaggaaagacccagagaaaagatgcttgccaaaggcgtaaaaagcttatcaaatgctgagttgttggctatacttttaagaactggcaacaagaataaaaatgctattgaattagccaactatataataaatagagatattcagggtattagacatttagaagatatgacaatagaggagctgtgtaatatagatggaattgggttatcaaaatcaacccaaattaaagcagctttagaactaggctctagagtagctagttttaaacctataaagtataaaataaggaatccttgggatatacagaggtattatatggatagcctaaggtatttaaaaaaagaggtttttaaagcagttcttttaaacacaaaaaatgagataatatctgatgtagatgtatctatagggactttaagctcgtcattagtccatccaagagaggtttttaaagaagctataagaagaagtgcaagtaagataatagtgatgcataatcacccctcaggaagtgtagaaccatcaagagaagataaaaatatcacatcaagacttattaaatgtggagaaataattggaatagaaataatagaccatataattattggagatggattatactttagctttaaagaaaatatgataatttgactttatatgtgataaaataataggagaatgttttaaacatgattcttaatagtaggaaggagtaaaatcatggctaaggaaaaaaagaaagaaaaaaaaggtttttttagttttaataagatgacaaaggatatgggaatagatttagggactgcaaatacattagtttacataaaaggacaaggtattgttgttagagaaccatcagttgtcgcaataagagatgatagtaaagaggtattagcagtaggtgaagaagccaaaaaaatgataggtagaacaccaggaaatatagtagctataagacctatgaaagatggagtaatagctgattttgacataactcaatcaatgattagctattttatacaaaaagcggctgataaaaaaggtgttgtaagtccaagaatagctatatgtgttccttttggagttacagaagtagaaaagagagctatagaagaggctgcaagacaagctggagctaaagatgcattccttatagaagagccaatggcagcggctataggggctggattaaaagttgaagaaccagaaggtaatatggtagttgatattggtggaggtacttcagaaatagctgtaatatccttaggaggaatcgttactgctaaatctataagaataggtggagacgaatttgacgagtctatagtggcttatgtaaaaaaagaatataatcttatgataggtgaaagaactgctgaaaatgtaaaaattaacataggttctacatttaaagatgatgaagaaataaatatgcaaataagaggtagagatttaatctcaggattacctaaaacaatagaaatatgctctacagaagttagagaagcattaaaagaacctgtaagttcaatagtagatgcaataaaatctacactagaaagaactccaccagaattagcctcagatataatggaaaacggaataatgctaacaggaggaggcgctttgcttagaggtcttgataagcttattacacaggaaactggtatgtctgtacaaatagcagaaacacctcttgattgtgttgcacttggaacaggtaaatctgttgaagaccaagaaatctttgaaaaagtattaatgatgaatactaagaattagaagttggtgatggccttgagatttgacaagaacaaaaatgagaaaaaaaggattaatgttaaagtgatagcaacgggcgtagttgctatcactttaattggaattgtgggtatatcaattggtaaattttctagtggtagtccagtaaatttaggagtagcttcagatgctattacaagtgtaggtaagggaataaatgatggattttcttttatcaaaaatggttttaaagatgtagcaaattttaaagataattctaaaaaggtaaaaaaattggaagaagaaaatgaaaaacttaaaaaagatatgatagctttaaatgccaaactagataaaacagaatcgctagaagagttaaaaaagacactgaactttgtacaagaagagtataaggcgacaagtatttcagcaagtgttgttggtaaaaatgatggaaactggtatgagagttttgtcataggtgcaggaaaaaattcaggtgtaaaaaaagaaagtatagttatgaatggtagtgggttagttggcatagtttatgaagtttccaacaattatagtaaggcaatttcactattggattctaaggcatctgtaagctttaaactagcaaaggatgccaatgctaaaggtacaattactcaaaatactactttagataataaagatagttataatagtaaaggatatttgcaaggatatatgtttgactcatcatataatgtaattcaaggagatataataacaacatcaggtcttggattcttcccagatggtataccaattggcgaagttgaaaaggtggttgatgataaagataagtcattaaaatatgtagttgtaaaaccttatgttgattttaagaatataaatgacgttgtagtcatagaaccaagaaatataggataaaggggataaaaacaatgaaaaaagttttactttgtctgttggggattgtgcttatgactatagaaaatagtataacaaattatatagatatttttggcataagctttaatttagttcttatatatgtaaccataatctctctttatttagatgaattagaaggtgggattatagcagcaataatagggcttattaaagacataaccgttggtggaatttttggtgtaaatgcattaattttgtttattattgcatatgcaattggatacatgagagatcagctatataaaggtagttatattattactttcgttttaatttttataggcagtttaattgattcaattgtcaatataggtacatctagtataatttatcaaagctacaacatatcaacactttttgtaaaaggtctactagtagcaccaatagtgaatagtttaattggtttagtaatatatcgcttatctaaaagagcagttttaaaacttaaagaagattagttggtgatttcatggaagaaaataaacaagttgatagactaaaaataattaagatagtcatgagcgtgatatttttagctattttagtaaaaataatctatatgactacatttaaatatgaatattacaatgagttagctgagaataaaacatataaaaagttggcaatagaagctccaagaggagaaataaaagatagatatggaagactgttggcaggaaataaaaacttatttactgttcaagtttcaggtaacgatattaataagaaagatgcaaataagcattcaagagcaaatgaaatatcattaaaacttataaatttgctggagagaaatggtgaagaatatgtagatgagtttcctatatatgtagaaaatggaaagtactattatacatatgacagagatattagggaatataaatcagaaaatggtattccaaatgattataatgctaaggaaagtttttattacttagtagacaaacttatatcagctggaatattatctcaagaagataaaagattggatgcgacaagattacaggcaaaactaaatgaaaatggatattatccacctattttagttagtaaatggatgttcacagcagaaagagataagagagattggttggctagttataagataaaagaaactaaactgagtgccaaagaagcgtttgaaaaagtaagaaatagtgatgcattagaaattgataaaagtttgagtgatgaagatgcaagaaaaataatggtcgtaagggatttgataaaatcaaaaggatattctcaatataatccagtaactattgctaaggatgtaggagaaactacgattgctcaaattgaagaaagtgctatggaccttgttggtgtttcaatagcagtagaaccagtaagatattatcctaatgggtcattagcttctcatatgttaggatatgtaggaaaaatgccatccactcaaatagaatcataccttcaaaaaggttatgaaactggagatatggtaggtcttgcaggagtagaaaagagtaatgaaagtagattaagaggaactgatggttataaaatggttaaagttgatgcattgggtagaatcagtaaagaaattgaatctaaaaaacctaaatcaggagatactgtgtatcttacactagataaagatttacaagaagtttcagataatgcattaaaacagataatcgaagttgcttctaaaggaggtacttttaaaagtaaatttggggacaaaccaattagtgcatatgcaggaaaagcacagtcagcagctcttatagctattgatgttaaaaatggagaagtattagcttcatcaagttatcctaattatgacccaaataaatttgcaaaaggtatttctacagaggattataaagcacttcaaccaaaaaatccaaatgacttactagcaggaagtccacttttaaacttggttacacaaggggaatttcagccaggttcttcatttaagatgctaacttcaatggcagcattagaaaatggtttggatccaaactttactataaatgaccctggggttataatgttaggtaaaaaatcttttggtgactatgtatggaaccatggtagaggaaaccatggtatgacaaacttatataaagcgatacaagagtcttgtaatatatatatggcaacaattggtacaggtaaaacatggccagatggaaaaagcattggtatagatatgaatgcaaataaaatacttgagtatgcaaaattatttgggcttgaccaaaatacagggcttcaagatgaagtagaagaaagagcaggtaaagttcctagcacagaagataaattgaaatcaacacaagctcttctaaagtcaaatttagaaagagaaatggcaaatgattttgttgatataactagagaaaaaaatcctaaagaatatgagaaaagaatcaatgagattgtaagctgggcagcagaaaagaaaactcctggtagagtcgaaacaatgaataggctaaagaaaatgaatgttaaagaagatagaatagaagaagtagcagatttagcagtattcagttattttaactttgcaaaatggagtactgcagatacatttaacttagctataggtcaaggtgaaaatgcttatacaccagctcaaatatcaagatatgtagctgctatagcaaatggaggtaatttagtagaattatctgtagttgatagagctgtttcaagtgattattcatcagttaaaattaatgaccagaagaaagtcgaaaaaataccttttaaaaatccagataacttaaaagaattaacaaaaggtatgaaattggttgcaagacaaggtacagcgaagagtgcttttgctgattttccaatagatgtagcagcaaaaactggtacagctgagaaaagtgggaaaatacctacagataacgagtatgaatatttaaaaagtcatatgtcatcttataatgtcaacctaaatgatgcgattaaactagctgataagatgaaagcagaaaaagaaaaagagctttcattagctaaggaaaaggaaataaaaaagaaattagaaaataaagatttgaaagacgaagaaagaaagaaattagaggaagaattagaagatggagtaaaagttagattagaggacactgataaggtgaattcttcatatctaagaaaagctataaaagaattaaatccaaaaataacagatgaccaaatagatagatttaaacaagattatggttcttttacatggactgttgcttttgctccagcagatgacccagaaatagctgttgtatgtgtaattcctcaaggtgattcaagtgtattctcacttttaccaactagagaagttattggaacttatatgggattagagccaactaatagtaaaaatgacaacaagacgaatgatgttaacaattcttctgacgaaaatataaatttcgagtcacaaattaatagatagcttaatctatgtataaactttagctttatatagaaaaaataaaagggtttaaagcgtatttgaagaatataaatgatatatcactctggaggttgttatgtctttaagagaaatttgtagtcaagaactagtagagttcaagggtaataaaagagggataatagtaaatataaaaagagaagctccatttgaggaaatacaggaaaaaataataaacaaattggaagcatatgttggcttttttaatggggctaaaattagtaaaattaatagtgattgtttaactgacatggagattctagaacttaaagaaggaattacttctagatttgatgtggaatttgttgaagatcaaaaaattgaagaaaatagtaattttccaacaaaatatgtcaataccctaagatctggtgaaaatattgaatttgaaggtgatgtagttatattgaatgatatgaaacctggttcaaaagtcctttcaaaatcaaatacagttgttatgggagatataaatgctggtgctaaggttgtagcaggaggtaatgtttttgtaatgggtaaaatagaaggttttgtacatgcaggtgcagaaggcaatgaatttgcatatgttgttgctggaaatcttaatcctaaaatattacaaatagcagataatattgcagaagctccagatgatgaagaaaattatgaaaatgaatcagaaattagcccagaaatagcctttgtaagtaatggaagaattgtaatcgaaagctatttgtcaaagttagacaaatagaaagaaaaatagggggtagtattatgagcgaagttatagttataacatctggtaaaggtggggttggaaaaactactaccgcagcaaacttaggaactgcgctaagcctagaaaataaaaaaacagtagttgtggatgcagatattggacttagaaacttagatgtagtaatgggtcttgaaaatcgaatagtttatgacatagtagatgtagttgaaggaacttgtaggcttaagcaagctctaataaaagacaaaagatttgataatctatatttattaccagcagcacaaactagagataaaaatgctgtctcagttgagcagatgattgatctgtgtgagaaactaaaagaatctttcgagtatataataatagactgtccagcaggtattgagcaaggctttaaaaatgcagtagctggggcagatagagctattgtagttactaatccagaaatatcagcagtaagagatgctgatagaataataggtctattagaagcaaatgaaataaaagagataagattagttataaatagaattagaaatgatatggttaagcgtggagacatgatggataaacaagatataatagaaatattagcaatagatttgttaggtcttgttcctgatgatgaaagcataattatatcaacaaataaaggagagccagctatacttgattctaagtcacttgctggtcaagcatacaaaaatatcgcaaaaaggatactaaatgaagaagttcctctacttgatcttgaagttgaagatggattctttggtagacttaaaaaaatgtttagcatggctaagtagcaaaggaggatacatctgtgttagatttatttagagttttttctaacgaggctaaaactagtaaatctgttgctaaagagaggttaaagctagttttagttcatgatagagtagattgttcaccacaacttttagagatgataaaaacagacattttaaaagtaatagctaattatgcagaaatagaagatgatggtcttgaaataaaaatgtctaaatgcagaggtgagcatgatgacaaacctgtatctgcattagttgctaatataccactaaagaatataaaagatagatgtatgtaattagtgcttaaaagggggatatccttattggtatatgccccttttatttaattatatgtttaaagatagaaagacggtgattctttgaaaaaaatcaatattaattataagtcgacaattaagttgataaaacagttagactggaaacttatagttacagtattagctatctttatttttgggcttgttatacttagtagtgcaacacatgctaattcaacaggttcatataatcaattgattaaacaaggattagcttttgtacttggtataggaatgattatagtcatattattttttgactataatcttctaggcaggtattataaagcgctttatataataagtcttattttgttagccatagttttattacctggaattgggacagtaaaaggtggagctaggtcgtggattaacttaggaccacttgacttgcagacatctgaaatagtcaaattaacatttgtactaagttatgcaaagatacttgaatccaaaaaggataaattaaatacgttaaaggaagttatgcctgttgtagtttattctcttccatttatcggattattgattgcacaaccagacttgggaacaggaattgtattttgttgtatgatatttgcaatgctgttcacagcaggtcttagctcaaagttgataaaaagaggaataatcatactattagtgtcaatgccactgatgtatttaatgatggcagaccatcaaaaggtaagaatagaagcttttctaaatccagaagatgtaactctaaaaggaaactatcaagttatgcaatctctgattgcaattggttctgggggcgtaactggtaaaggactttacaatggaagtcaaaatcaagaagattttttacctgtacaagatagtgattttatatttgctgttgtaggtgaagaacttggtgtaataggaatggcagtgttgataatcttatttatgatattcctattaaggcttttagcaattgcaagagatgcaaaagatttttatggaaccctcatagtggttggtgttatgggaatgtttggttaccagataatccaaaatataggtatgacggttgcgttaataccagtaactggagtaacattaccttttgtaagttatggaggaagttcgttattgacatctttagcaaacttaggattagtactaaatgtgtgtatgagaagaaagaaaataaatttctaaatttaaatacatctaaacataaattgaggagattagatatatgaatatagcattagtagcacatgaccaaatgaaaaacactatggtcggattttgtataggttatgaatcaattttaaaaaagtatggactatatgcaactggaactacaggaaaaagaataatggatgaaactgaattaaatataaatagattagcatctggtcctttaggtggagaccaacaaataggttctttaatagtaacacaagaaatagatttagttatttttttaagagacccattgacatctcaggctcatgaaacagatatacaagcgttaataagactttgtgatgtttatcatgttccaatagctacaaatctagcttcagcagaaatatttataaaagctcttgatagaggagaactatcatggagagaagttagaaaaagcaaaagtcaacgtatttaaaaaatattaatattacagtctaaagaaacagatatataagtgtttaatgccctagtttttctgttgcaataaacctagtacctgtagaaatcttatgaaagatttaaatgatgaggagctaaatttgagattaaataattaggaaatagattatagatagagtagtagaatttaaactattactctattttaataatatgaaatagaattaagtctattattatatatatttaaacttataggtaatactatttcaaccaagtaaatgttgttacgacaacattaataaaacaaaaatttatttttaaaatttgataaatagctgtatattagtatttaatctataaatactaatatacagctatttattatttttaagtctattgtagaatataaaccttgtattatagagtactatgtattattatagtaaatataagtactatacattatagagtagtaggtgaaaaggcggtggtacataatgcagttaaataaagaagtgttaaaaggttatatcgatatattaattgtttctatattagaaaagaaagattgttatggatatgaaattgcaaagcaagtaagagaaagaagtgagtttgaattaaaagaaggaacaatgtatcttgcacttaaaagaatggaatctaaaaatttaattaaatcttattatagcaatgaacaaagttcaggtggaagaagaaaatattataatttaactaatgaaggtaaagattttttagaaataaagaaacaagaatggagatttattaaaaaggttatgaatcaatttttgggagaggtggattaatttatgaaactaatagatgaatatttagataaactatataaaaaatgtgacaataaaagtactatagaattaaaacaggaaatgagatgccatcttatagaatctgcaaatgaatttaaattagaaggattagatgaagaagaagcatgtaaaaaagcaattgaaagatttgatgatggtgatgaaatgcagtatgaattatgtaatataataaaagaactatctttatcattggataggcataaatcaattgtaatggggtttaaaaaagtattaggttacataagtataattgcatttttaatttctggatttatgtggtattacaataatagtttacaacataatatgtataatttaggaaaagaacttgatggagaaataaagcaattggcagaaagacatgatatgacaaatattggtgaatataagttagaacttgaaaaaatacttgataaagataagtatagtaaagtcaaagctcttagactatatgtaatagatatgaaagatggaaacactaatttaagttcttctggattgaatgctaatatggtatatgagagggaagcagattataataacataagtaattttatacagcatttaggatataatggaaaagattttttagacaagaatgggaatatagtaaatccagatattttcttagaatatttcttttattttgaatcggagatgttaattccagtagcatttgcatttggattattatgtataatagcgtattttatattaagatttaaaatttctttaataaaaaataataattaaataattcaccaaataattttaatttgtagagtaaataagatgtttcaaaataaaatttgaatcatcttattttttattgtttgttatactcttttcttttatatttctccatagtggattgtatctatacataatcacatattttgatataattataccttccaaaaaatgtattgaatatacaaattataatctgtataatgttgttaggggagaatgtatgaagtgtatacaattttaattttaaatgtattattgacaattctcctcactctcgtcattaccaataattagaaaattgacaaacctgttacagaccaacatttttgaatatattaattattatcattttattgtgatgatatcaaaaatgcaggtttgtgagttggattgtgtacgaactatataggaaatatagaacagattttccaagaaatctaaatattctatgaccacgtgaattgctatgcacacatgttgataatccatattttaaatctaaaatgaacttaattaatggtagggaattgaaagtaaaatatattataaaggagaatgctaatatgaaaaaaatcaggaaattagctactaaactattgattgcaacgatggttttaacctcatgtatgagtgtaacagtttatggtatgacagctaaagatgttactgcaaagacaccgaaaagctatgtagctggaaccaacagtatatatggtccaaagttatcacaagctcaacttaattcggtagcacaagcaacagcagactttatgaacaagaaaattacaaagaacatgaccacagatgctaagattagggttgcttataatcacattaaaaacaacacaacatatgttaactggaacgcagcagagggagccaatactgcttatacattggttactaaaaaaggtgcttgttctggaatgtgtaggagcttgaaagctttatgtgatgctatgggaattgaatgttattatgtacatagtacaacaaatgaccatcagtggaatcttattcgttttgaggatggacgtttgtatcatgtagatattgatgccaacaaatcagcaggagcagacatcatatacaagagtcttactcacccattaccatttgacaagaaagcctatccagctgttggtgaatcagtaaagacacagaatccaacgccaactgttaagaaacctacgccagctaagccttctgcgccagttggacctgggaatcacactatgatagcagatcaagaagaagcaatacttgatgaagtttatggaaataatctacgtcccaaaattgaaaggtatgagggagttccgtgtagtttaatcaactcatcaataaatacaattaagtttacaagcaaaaattcaaatttagacccatcaaggcatacagtttctgtaatagggtttatgaatacaccatatggtatggttgcattagctccagatggtgtacctgttgagtatccttttgaatatgataagccattttctttagattttactggtaaaaacctttctgcagcagaattatcaaaaaagtgtaaaaacaataatgtaattattaaaatagaaattggtgaaatagaacctaattctggaagagggcaagtaagatatgctagatatgtgaattaatataaatatacaagtatacaaatagaaaagattataaataatgtaccctcttggtgagggtgcatttatcattatattagtcattttgggaaataaaaaaggagttgaacttaaaattagattagaaaaattaattttgagacaactccattttaatttatttttaaatataaaatcatttattttaaataatattatgtgtgattaatggctatttaactaattttgcaaattctgcaccaaatgccatacactcttttaatgtctcttcactagggaagaattttttcttaagagattctacaggcattttgaatgacatagatttaagtaaagtctcagccatagttataccttcaccactccaaccaaatgaaccaaatactcctgctatcttgccttggttagccattgggtctataacagagaataaatcccacataggtttaaccatagttttgtttatagttggagaacctagtaatattacttttgacactactaatgtatcgtgcatttctgttaatgtcatatcttctaaatcatataattcagcctttgcaccttctttatcaagtccttcttttatctttttagccatctctaaagtattactataagctgataagtagaatatagaaacttgattttgattagttgtattaacagcttctgtagaccactcaacatatcttttaacagcagccattgggtctttagtaagcattggaccatgagaagtcaatatagtatcaaattctatgtttagtcctaccaccttatctacagcacttaaaacatgtttagcaaatggcttaactatacaatcatagtagtgtttagctgattttagataatcttcactattcactacctctgcatcaacacttgcaaagtgacaaccaaatgcatcacaagttaaaagagtcttgtcctcctcaatgtaagtaaacattgtatcaacccaatgtaagaatggagcagttataaatctaagatttcttttaccgatatttaaaatttcaccatcttttattacatgacagttaaaaggtctatttatttgaccatctaagtatagtttagcagctttagtacaataaacttctatattaggatttatatctaataagtattttaaactacctgcatggtctggttctgtgtgatgaattacaacatagtcaattttagctatatcagtaacctctgataaattacttaaaaactcatctttaaaatttgcctttacagtgtcaaataaaaccgttttttcgtccttgattaaataagagttgtaagttgtcccaaactcagtttccattattatgtcgaatacttttaaaccttcatctactacgccagtaaagtagatatctttttttacttcaaaaactttactcatttttaaccctcctaaaatttatcattatataagtaacatacccaattttgaggtgaatgaaacaaaagatgtcatgataagtcatgtaaaacaatagttttatgtttataatatatcatactttgtaaaaaaattgtatttcaataaaaatttaatagaaaatattcttaaatatttttagctattctattttgtgaataatatgtattttaaattcaatattttagttatatttttgatagaaaatattttatcgtgtataatactacttataaataagaataaaaataaagagcttgtttggaggaattttaataaatgaataaagtagacttgaaaaaaatcttaaaaaaagtagaaaagcctgctagatatcttggaaatgaaataaattcaattcataaagatactagtaatagtgaattgataagatatgcacattgctttccagatttatatgaagttggtatgagtcacttagggagtcatatattatatgatgtaataaataaggatgaagatgtattttgtgagagagtgtattctcctgcagttgatatggaaaatataatgagagaaaaaagtataccattatttgcattagagtcaagagagcctataacaaactttgattttgtcacttttacacttcaatatgaactttcatacactaatatcttaaatatattagatttagccaatataccaatattaaaagaagaaagaactttggaagacccatttataatggttggtggtccttgtgcttataattccgaaccattagcagattttatagatgtagtaatattaggtgaaggtgaagaggttaatttagaagtagtaaatgagtataaagaatggaagaaaaataaaacgactagagaagattttttatataaaatatctagcatagaaggagtatacataccaagtttttatgatgtcaagtacaatgaagatggtacagttcaaagtgtaactcctaatagagaagggattactaaaaatcctactaaaaggataataaaagatgttgagactgtagattatccagaaaaactaatagtaccttatatagatactgttcatgatagaatagtactagaattatttagaggatgtactagaggatgtagattctgtcaagcaggtatgatatacaggccaataagagaaaagagtgttaaaagacttaaagaaatattagataaattagttaagaatactggatatgatgaaatatcattatcatcacttagtacgagtgattatagtaagttatcagagttgactgattatttggtagatgaatatgcatctaataatattgggatttcgcttccatcccttagattagataatttttcaatggaaattgctgataaaatacaacaagtaagaaaatctggacttacttttgctccagaagcaggaactcaaagacttagagatgttataaataaaggtgttacagaagaagatttggaaaatgcaacagaaagagcttttgagatggggtggaatagtgttaagttgtattttatgattggtttaccaactgagacttatgaagatttagatggtatagctaaattagcttataaagttattgatatttatagaaaagtaaatggaggaaagctaaagagaagttttagtgttacagtgagtacttctacatttgtaccaaagccatttacacctttccaatggcatggtcaagatactacagaagaagttattaataagcagagacatttagtaaataaattaagaaataacaatataaaatacaattatcatgattcaaagactagtttgatggaagcagtagtagctagaggcgatagaagaataggaaaagttatatatgatgcatttagactaggtgctaaatttgatggatgggcagaacattttaatttagatatatggaaagaagctatggaaaagaataatctttctatagatttttatgcacatagaaatagaaactatgaagaggtatttccttgggaccatatagatgtaggtattagtaaaaaattcttaattagagaagacgaaaatgctaaaaaagaaaaaatcacttctgattgtagacataactgcaatggttgtggaataaatatacatgatataggaagggggctttgctaatatgagtaagataataagagtaaaatttaaaaaggaaggcgacatgatatatatatcacatcttgaccttcagagattgttacaaagagcgtttagaagagctgaaataaacttatcacattctcaaggatttaatcctcaccctaaaatgagttatggcaatgctttggctttagggacagaaagtcaaggtgagtatgtagatattgaaatagaagaagatgatttatcagtagaggaatttttaaataaagtatcaattcaacttccagatgggatagattttatcaaagcaaaagaaattgatagacaaacaccttctctttcttctgtgatagactatggagaatatttgtttaatatagatttgaaaagacctatgacgaaagagtttgtaaaaagaaaagtaattgactttatgaataataaagaaataatcataacaaaaaagaataaaaaaggtaagatggttgaagtagatataagacctatgataagaacctttgatgttttaaatttagaagatgaacatattactcttactgctactatagctacaggctcaaaaactaatttaaatactaatatacttataccaaagatattagagatgtttgaacttgatattgacccattagatgttgatatattgagaagagatttatatgtattagaagatggggaattagtgactcctatgtaagctcgagaggtgaagttgtgaaaaagatagttattgagtccctaatagggtcccagaaaacagcagtacttgaagatgaaagattaacagaactttttgttgaagacaatttaaataagaagactgtatccaatatatatcgtggaatcgtaaaaaaagttataccaggaatagaagcttgttttgtagatattggatttaagaaacttgcttatttacaattaaaaaagggaagtactataaaatctggtcaggatattttggttcagataaataaagaagaaataggaactaaaggcgcaaaattaaacactgagattagtatttctggaaggtatattgtctatataccttccaatgatagaactacaatatcaaataaaattactgatgaaaaagaacgatttagattaaaaaaaattactaaggcagtaaataaggaaaatctaggattaataataaggactgaggctcaaggttgcactcatgatgaaataaagaaagatatagaagagttgaaattaaagtatgaaaatattttaaaagaatataaacttggtataggtccgaaattattatataagtctttagattttgcaactaaatatgtaaaagataatgtgaatgatgatattgaatctataattaccaatagttatgataagtactctgaacttaagtctattttaagaggtatagataagacttatgttgataaactgtgtcttgaggaaaatagagatgtatttgatttatacagaatagaatctaaaatagaaaaattattaaataaaaaagtatggttaaagagtggaggttatttaataattgaaaaaacagaagctcttacggttatagatgtaaatacgggtaagtttattggaactggtaaacttgatgaaaccgtttataaaactaatcttgaagctgcaaaagaaattgtaagacagcttataattagagacatagctgggataataataatcgattttattgatatgcataaaaagaagcatcaaaaggagattttacacatcctagaagaagaatttaataaagataaaagaaaagctgaagtattaggtatgacaaaacttggtttagtagaagttgctaggcgtagagaaaaagaatccattgataagtattatttaatgtcttgtccatgttgtgatggtgaacaaacaataaaatctgtacattatatactagatagtattgaaaaagaaattatgagaataagtgaacatactgtttacaaaaacataatggtagaatttaatgattttatttttgaacaaataaaagaatattatatggatataattgataaaattggtgaaaaatataatataaagatttctttaaacgcaaatagtacattaaagcacaataaaaccaatgttattttcgataaaatagttgacaataaaatgtaaatattttataattaataattgtaatgccgcacagtaaaggtttaaatcttcaaatgaagtaccttgtactggcgagtttgaggccgaggaggtgtatttaatgtacgctatagtaaagactggtggaaagcaatataaagtttctgaaggtgatgtattattcgttgaaaaattagaagctaacgcaggtgatgttgttactttaaacgaagtattagcttgctctaaagatggagaattaaaattaggttctccagtagtagaaggagcatctgttcaagctaaagttgttgaacaaggtaaagctaagaaagttatagttttcaagtataaagcaaaaaaagattacagaagaaaacaaggacatcgtcaatcatacactaagatagttgtagaaaaaataaacgcttagttattggttaagttatgataaaagttaaatattattataatgatgatttcttgttgcaaggtttttgtttaaagggacatgctgattttgctgaaataggctatgatatagtatgtgctgcagttacatctaatgctattgcagttataaattctttagacaaattacaaaagattgaatttgaaaaagtagtaggagaagaaggtcatatagagtgtatagtcaaagatacgcatgtaaaagacgcacaattattactaaatcactttcaattagcggttaaagaaattaaacgggaatacccaaaaaatataaaaattttaaaaaagtagggggtgactccatatgttaaacatgaatttacaattattagcatctaaaaaaggggtaggttcttctaaaaatggtagagattctatatctaaaagattaggtgttaagagattcgatggtcaattagtaactgctggaagtataatagttagacaaagaggaactaaaatacatccaggaactaatgttggaaaaggtagtgatgatactttatttgcattagttgatggtactgttaaattcgaaagaaaagacaagaagagaaaaaaagttagtatatatccagtagcaatagctgagtaatatacataaaaggagtgttgaggcactcctttttcttataatactgatgaatttataatggtatttttggtaatgctaattaaaagtttttaattaagtaggtgaagaatttgtttatagataaggcaagaatatttgttaaggctggaaatggtggaaatggttcggtagcatttagaagagaaaaatacgttccagctggtggtccagacggtggagatggtggtcgtggagcaagcatcatatttgaagttgatttggggcttagaactctaatggactttaagtaccagaaaaaatatcaagctcaaaatggtggcgacggaagcaaaggaaaaagagctggtaaaaatggagaaaatttagtattaaaagtaccagcaggtacagtaataagagatgaggctacaggtcttgtattagcagatttaaaaaaagaaggagatacagctatagttgcaaaaggtggtataggtggtaaaggtaaccaacactttgcaaatgcagtaagacaagctccagcttttgcaaaatctggtacagatggagaagaaagatggataactcttgaacttaaaatgatagcagatgttggtcttttaggatttccaaatgtaggtaaatcaacatttctatcagttgtaactaaagctaaacccaaaattgcaaactatcattttacaacacttacaccaaatctaggtgttgttcaaactaagtttggagatagttttgtacttgcagatatacctggaattatagagggtgcttctgaaggcataggattaggtcatgagttcttaagacatgttgagagaacaaaggtattgatacatattgtagatatatctggattagagggaagagaccctattgaagattttgacaagataaatgatgagcttaaattgtacaatgaaaagctttcaaagaggccacaagttgtagttgcaaataaatttgatatattagaagatgagagtaagtttgagaagtttaagagtgaattagaaggcagaggatatacagtatttaaaatgtcagcagcaactcgtcaaggcatagatgaagtaatagcctatgtttctaaaatgctaaaagaagtagaagatgtggagctagtttcagaagaagaaatgtatagaccagaacttgatattggtactgaagaagagttaagtatagatattgaagatggtgtgtatgtagttacaggtaaagcacttagaagaataatgtattctgtaaattttgatgatatggaatcccttcaatatttccaaaaagctatggagagtcaaggtgtttttgataggcttagagaaatgggaatagaagatggagatgtggttaaaatttatgaattagaatttgagttttacaattaatttaaatatagattatagataatttaagtatagaattatagaggtgagaatatgttaaaaggaaaacaaagggcgtatttaagatctttagcaaatactttaaagcctactacacaaattggtaaagaaggtgttacagagagtttcttagagcaattagatggtatgttaagaactagagaattagtaaaagttactatattagaaaatgcaggtcttgatactaaagaaactgctaatgcagtatgtgaagctttaagagctgaatttgtgcaggctattggttttaaatttactatttacaagaggaatattgaagagcctaaaatactttttccaggacatgaacaggcgaaagcaaagactaaaaataataatgttacaaaaaagggtaaaccaactaaaagagctgttagataatagtttatatccttttagggaaataagttaaaaaaatagtgacaattggaagaaattgtattatactattaaacataaattttaattagcaatcttatcaagagtggcagagggactggccctgtgaagcccggcaaccagtatatttaattatacattggtgctaaatcctgcagcatttatgctgaaagatgagtataaacccgtcatatggcttgagtttatactcaagctttttttattggtatatttatatatataaataatttaatataatcaaaatgatgggggtatgttacagtgaagatagcaatattagggtatggaacagtaggaagtggattaattgatttaatagaaaataatacttcaaaaagagatatagaagttgttggaattttagttaaaaataaagaaaaacacaagtataagaagtattttgataagataactactgatatagaagatatatttgacaaggatattgatatactagttgaagtaattggaggattaaatccagcttttgattatgtaacaagagcgttaaataaaaaaatacatgtagtgacagctaataaagatttactggctgaaaaaggtagtgaccttatagaattagctaacttaaataatgttagcatcaagtttgaagcatctgtggcaggtggtattccagttttaaaaccattgatagaatcactggaaggcaacaatataaagagcataaacgctattttaaatgggacttgtaattttatattatcaaagatgtatgatgaaaatttaccatatgatgttgctttaaaacaggcacaagagttgggatttgcagaagttaatccagatgcagatgttttaggatatgatagtgctagaaagttatctatattgtctactttatcttatggaaaaatagtatattggaaagatttattattagaaggaataacttcaatagatgaaaaagatatagaatatgcaaaaaaattaaattgtaagataaaattggttgctagaagtaagtatgaatcaggagaagtaagtggatttgttagaccagcattagtggacaataataatatgctttcaaagatagataatgagttcaacgtagttattttagtaggtgattcagtaggtgaactttcttttgtaggtaagggagctggaagaggtgcaacaggaagtgctgtttatgcagatattatagatataatagataatagaagttcaaatataaagtctttttcaaaagggaaattggatttaagtggacttatagaagatgagtgtagtgcagtagttagatttggtgggtataataataaagatggaattttagaatgtttagataaatatgtagatagttatgatattatagatgatgaagaattggcgatttttgtaagtgcaaagtcagaacatgagattgatagagttttggaaattgtaaaaagaaataattacagtgaatcagctaaaaaattattgaagatagattaatatgtttatgcaagaattatgaaaatttaatagggtgtctcaaaatagagagacaagccttttttccagtattgaaataataaaaatatatttgattttataaaaaaagagtgtctcatgaactaaaaagttcattttgagacactcttttttaatatctggtgaattaataagataatagaaaaatgtatacgttataattaaccaataaagaaattttcactagcttcattaatagcttgctgagttactcttatatatcgctgtgtagtggctacagaactgtgatttaaaagttctttaaccaactctaaattattgttactcttttcaaattgagtagtagcatagagctttctaaagctatgtgtacttatattatacagatttaagtgtttacaaattatcctcaactgtttttgaatagcctttgtctttatatttactaagtagtcatttgatttaagattatactttcttgcatgttcatttatggactcaattatatttttattaactggtctatactgtaatttgcccgtctttttttcatttatttccaacatattacctttaaaattacctatctttaatcttaaaatatctgatattcttagacctaaattagcttctaacattagtgccaatgcaactttaggattttttctaaatcttttttcaacgccattttcactataagtaaagccagtatgtaatagttccattatctttttatattcgtctatttctataggtcttgttgccattttcaaccactcctcttagtttgatttggtaagtttaggtcggtatttattatataatataaatgaaacattatataatggaaaaatttcccagtaaacttatacaagtgtgatatatgtgattaaggagaattttttgaaaaatatttctaataaaattattaaattgtgatgaaataactatgctgttaaactaattaaaaaggttattaaaattatgacaaatataataaaaaaatggaagtatttagttaagttttattagttttatttttttcgtgaaaatttcttaataaaaaaagtatttttatatcgcattagtttcccatttgtagataaagttttcatatgtttttttgcaataaatactgctgagattagataaattattactacaatttgaagaattgtatcataatagctaagataataaaaccagattaaattattatatataacgttgtatgtatcagcaaagctagaaaccaacacagcagagtttgcaattggataaagtataaatataaagatagcagctaaaactccatgcgcaaatttacttagtatgtataattttaaatctatgtccgtttttgatagaaatgtacaacattgagctaggatggataatccactaaatcctatcaaaaagctagctaaagatgctcttaaaatttctggagaacttgttatactagatactttattgcatcctatagtaatttcaaatagaccacttacaaatgcttgacagagttctttactaacacctaaaaatgaaagaggcaaatatataactgatgctattaatgagattacattaaaaagagatagtattttaaatactactgaaaaaacaattacaaatccaccaactgtaagtaatgtatttactccattaaatacagcatttccaaataaaacaaaaaaaccattcccacttgaatttctaatgttgattacattttttatatttgtttttaaatccaattttgtctttggaagattttcattaccataatttctaaagaaaagaccaaccaatatagttcctagataatggcagagaatcattaaataacctaagtttgaattttggaacatacctgtaccaaccgaacctattatgaataaaggtcctgatgtagaacaaaaagacacaagtctttgtgcttcatgcttagaaatttgcccattactcctaaattcagaagctaaacttactcctactggataaccagatactgtagatatagcaaaagctaaagcgctctttcctgaaacattaaatacaaatctagttatgggattgatgataaaccctataatatccactatttttaaatcaacaattaagtttgctccaattataaatggtagtagtgatggaactaaaacattagaccatatagagaagccttctcttgcagattttatagcttcatttgggtataggataatccctaaaactagaactccaactataatagctggagcaaaaaaagcaataattttattttttttcataatatcacctgtaaatttgagttataagatattatattaaaagtaataaaaatatatgaatgtaatggtttaagatatataatagatatatattacaacaacgattatcatattggaggaaaaaatgtttaatagtatagctagtaaaaaagtttatgaacaagtaattgagcaaatacaatataaaatactaaatggagagttaaaaaagggggataaattactatcagaaagagaattgtctgaacaaatgaatgtgagtagaacttccataagggaagctattagggtattagagactatgggagtgatagaaagcagacagggtgaaggaaattttatatgtacaaatatagaaaaaactttaatagaacctttatctatgatttttaaacttaataatggcacacttgaagatatattagagcttagaataatcctagaaattgagattgcaaaacttgcttcaaagagaataacttcttctgaagttatagaattgaaacatataatagatgaaatgagagtagaaactaataaaaaagataataatcgagtactggtgttattagaccaaaaatttcacagtaaactagcaacattaagtaaaaattatttaattcaaagtctttttatgacagcatcaaaattatttgatggatttatagaagatgcaagagaaaaaataatcgcagaaccttttaatgaaaatatattgcttaaacagcatgaagctatatacaatgcagttgtagaaaatgatgtagaacttgcatgtgagaaagcaaaggaacatatggattttataagtaaaaattatagaaaaaatgaaaattaaaagtttgttataaaataaattattcttgcaaatggtagataatggtactatcatataaatgtgaaactggtatgaccacataccaattttatagtttattataatgggagattaaaaatggtaaagttaaaagtaccgtattcaaaacaaggaatgattttagaaatacctgatgaacgttttctcggtgttttggagtcaaaatcggataattatatagaacataagactcaagaagagatagttgaagaatctatgaataatcctataggctctaattctctggaagaactggttaaggggaaaaagaatgtagtcataattacaagtgaccatacaagacctgtaccaagtagaataactatgccaattatattaagaaggattaggaatgttaatccagaaattgatgtgaagattatagtggcaactggatttcataggccaagtacaagggaagagctaatttataaaatgggagaagaaatagtagataatgaagatatagttatgcatatatctactgatgataaatctatgtgtaaagtagggatattgccttcaggtggagatttatatataaacaaactagcatatgaggcagaacttttgatagcagaaggttttatagaacctcatttctttgcaggtttttcaggtggcagaaaaagcgtacttccaggaatcgcatctgcaaagactataatgtacaatcactgtagtgactttatagatagtgataattcaagaactgggaaattgaataataatcctattcatgaggatatggtatatgcagctaaagttgcaaagttagcattcatattgaatgttgtaatagataaagataaaaaaataattgcttcctttgctggtgatgtcgaaaaagcacatactaaaggatgtagatttgtaacagagttatcaaaagtaaattctataaaatctgatattgttgtaactacaaatggtggatatccactagaccaaaatatttatcaatctgttaaaggaatgacagcagctgaagctacttgtaaagacggtggagtaataataatgatttcagcatgtaatgatggtcatggaggtcaatctttttatgaaaatgtagcaaatgcagattctccaaaacaacttttagataaaattagaagtgtcgatagagtagatacgattccagaccaatgggaatttcagatactagcgagaatattatctaaatatactgtgataatggtaacagataagtgtaatcctgaaatgataaaaaaaatgcatatgaaacatgcatttaactttaaagaagctttagaaatggcgaatagtatagttggtaaggagagcaaagtagtagttatacctgatggagtatcagttatagttaaataaaaaaggagtgtactttatggaaattttgacatgtattaaacaagttcctggaacgacttcagtagaagttgatgaaactacaggagtactaaaaagagatggagtagattcaaaaatgaatccctatgacctatatgctttagaaacagctcttagaataaaggaagataagaaagcgaatctaaaagtacttagcatgggtcctcctcaggcaaagaaggtaattgaagaaagttttatgatgggagctgatgaaggagcattaataagtgataggagatttggaggagcagatgtattggctacttcctataccatatcacaaggtattaagaagatgggaaaggtagacctaataatttgtggaaaacaaactactgatggtgatacagcacaggtgggacctgaagtagctgaatttttagatatacctcatgttactaacgttacaaaattaattgaagttaaagatgaaagtatagttgttgaaatagatatgccaaatgatttacaagtatgtgagattgaatatccatgtttaataactgtagaaaaagacatttttcaaccaagactaccttcatttaaattaaaacttaatactaaagatagagaaatacctgtatatagcttagatgactttgaagataaagatgaaaataactatggacttaacggttctcctactcaagttgtaagaatatttcctccaaagccaaatacagataaaaatattgtaagaggaaatgcagatgaactaagttttgcacttgtaaataaattagaggaattaaagttggtgtaagggggagtaataaatgtcaaagatagttgtaaatcaagataaaataactgacttaaagagaattttagaaatatgtccttttggggctatagaagaaaagtcaggtatagtagaaataagtgctggctgtaagatgtgcaagttgtgtgtcaaaagtggaccaaaaggcgcatttgaatttatagagagtagtaaagtacaaattaataaagatgaatggaggggaattgcagtatatgttgaacatcataatggaaatatacatcctgtaacgtacgagcttataggtaaagctcgtgagatggcatcaaaaataaaacaacctgtgtattgtgtatttgtaggaaaagacataaaagataagtgcagtaatttgatttcttatggggtggatgaagtatttgtatatgatgaagatgaatttaaagattttaggatagaaccatattcaaaagcaatagaaaactttatagataaaataaaaccaacgatagtattagttggtggaactacattaggtaggtcattagctccaagacttgccgctagatttagaacaggtcttacagcagattgtacaatacttgatattcaatcaaatactgatttagaccaaataagaccagcatttggtggaaatataatggctcatataaacacacctaataatagaccacaatttgccactgtaagatataaaatattttcagcaccagaaaaaatagagaatactacaggaaagataactttatgtaaagtagaaaaaaaagaactaaaatctaaaattaaggtactgagtgtaaaagaaaaaaataaagaagttggtctggaagaagctgaagtgatagttgtggcaagcagagcaataaaaaaacaagaagatatggagatgatatataaattagctgataagctaaacgctcaagtggcaggaacaagacctgtaatagaagcaggttggatagatgctaaaaaacaaataggtcttagtggtagaactgtaaaacctaaattgataataacttgtggtgtatctggagcagttcaatttgttgcagggatgcagggtgctgactatatagtagcaataaataaagatgataaagcgcctatacttgatgtagcacatttagctttaataggtgatatttatgatattattcctaaattgattgaaaaaatagaaaataacaaagataataatcaaaaatatatggcatcagcagctaaatagggggatagaaatgtataaattaatcgataaaaaagatatagattttttaatagatacttgtggagaagaaaatgtattagttggaagtgatataaatgaagatttttcacatgatgaacttggagggattgagaagtaccctgaagttttagtaaatgtacttgaaactgaacaagtatctaaaataatgaaatacgcatataaaaataatataccagtcacaccaagaggtcaaggtactggtcttgtaggtgctgctgttgccataaatggtggaataatgattaatctatgtaaaatgaataaaatacttgaagttgattatgaaaatttaacattgacagtagaaccaggtgttttattgatgacaataggtcaatatgttcaagatagagatttattttacccacctgacccaggtgaaaaaagtgctacaattgcaggtaatataaacactaatgcaggtggtatgagagcagtaaaatatggcgttacaagggattatgtaagaggacttgaagttgtactaccaaatggagaaattataaatgtaggtggaaaggtggttaaaaatagttctggatatagtataaaggatttattagtaggttcagaaggtactttaggaatagttactaaagctatattaaaattgcttcctttaccaaagaaaagtataagtttgcttataccatttccagatttatcaatggcaatagaaactgttcctaaaataataaaatcaaaatcaataccaacggctatagaatttatggaaagagatgtaatattggcagcagaagaatttttaggtaaaaagtttccagataatacatcagatgcttatcttttacttacatttgatggaaatagcactgaagatatagaaaaggaatatgaaaaagtagctaatttatgtttagaaaatggtgcattagatgtatttatatcagatacacaagaaagaaacgattctatatggtcagccagaggtgcatttttagaagctataaaggcatctacgacacaaatggatgaatgtgatgtcgttgttccaagagataagatagcagagtttataagatacactcacgagcttcaagacaaattaaaaataagaataaaaagttttggtcatgcaggagatggaaatctacacatatatattttaaaagatggtatggatgataatacatggaaaataagattaaaagaaacttttgactatatgtataaaaaatctagagaacttagtggtcaagtttctggtgaacatggcataggatatgctaaaaaagagtacttacatgaatcaaattcagatgcttatatgatgttaattaaaaatataaagttagcttttgaccctaaaaatattttaaatccagggaaaatatattagaaatattaatttaataatatttacaaaacaaaaaatattaaattagatttaaatataatattttaaactttacttttaaatctgaagctaaattgtaaaatttttaggatggcaatatttacttaaatttagaaagtaacataatatttaagttgatgttgtcatcctaaaagcatgtgtacataaataaagtaagactattgtatcttatataataaagagttaataaaatgatttttataaatatagttattttaaaaaactactttacatatattggatgagtataaaaatccatagggccttttactaaatctttattgtttttataatatattgaattatatatatttgtagcttttatatcataacttatgagtgttttaaaaatcgtatcatctaatgaaaatgatatatttgaaaacttgtttattatttttatttcagatttattttttatctcttttagaatttctctacctttatcattaaaagcaagtattcttatataaggtatagtatctatgttttttataagttgcatgtcgctttttttaatacctaacaatatattgtttagagttcgtttgattttggttaaagtgtatcgcttggatttaattgctaattgtagctcatgtagaaattcagatgtaaagatatctttatagattctgttttctatgccttcatttacttcaaaatactcttttaaagtgtccatatctctaagtataattgtttttaaaatatcaaagaagaagtcatcaaacataggtaaaaaaccattatctactttttcatttaggatgttataagttttttctggaataacattttttaaatgaaaaaggtctgtattttctttaagtgaagtccttatagcagtagcagaacaaatatcactctcaatttcttcggaattatattctgattggaccctggagatagtaaatggttttatactactgtttaaatggatgaggttttttatgtattctatacccagtatgttgtttgatgaatttaatgtttttgataattgttcctttgaataattttgtataaaattattttttttgtcttgatgtatataatcaaaaagtgcattagctctagctgttggaaataacaggccatcatctaaatatttttttaaaagtaacttaaattcatttggttcatttgctaaaatttcagctatattataaagaatttctgtatttccttcttcactaccaaaacatatagaatttatgcagtttagtgaatttaaaattgttatagcaccatgagaaaaaatttcagcactttgacaagcaaataaagttggtaattctataactaagtctacaccattttcgacagcaatttttgctctagtatatttatcaaataaagctggttcgcctctttgtagaaaatttccactcattattgctacagtatgtgttgcatttgttttttctatagatttagataaatgatatatgtgtccattatgaaatgggttatattcaactattaatccaagtatgttcataaaatactccttttatctttaattattttatatatatcacaatttattataatatgtataaaatttaaatttttaattataaaattaaaaaacgtaaaaaaatttataaaaatgtagaaatgttacctacataaaaaactggttaaatgttattaaaataactttattagctctttatattatattattataacaaatgggaaagaataatctacattaagttaacttgttaatatattattagtgaaatacacaatttaccatactagaaatatgatataatataaaaaaaaagtatatacttttatattaaaaggtgatatattatttatgaaaatcgtttaatgtatacaataatatatctataacaaaataataaaagatagagttttatttagacatttattacaaatcaaaatttattacatattatttataaaaaaatctaaggaggaaataataatgaaaatattagtattaaactgtgggagttcttcattaaaatatcaattaatagatatgaataatgaagaagttttatgtataggattggttgaaagaataggaatagaaggttctatattaaaacatgaaaaagcaggtagagatgataaatacgttgttgaacaaccaatgaaggaccacaaagatgcaatagcattagttttagaagctgttgctcatccagaatttggtgcagttaaagaaatgaaagaaatagatgcagtaggacatagagttgtacatgctggagaaaaatttgcaacttcagtagtaataactccagaagtagaagaagctttaaaagaatgtatagatttagctccacttcataatccagcaaacataatgggaatagatgcttgtaaagctatacttccagatgtaccaatggtaggtgtatttgatactgctttccatcaaacaatgcctaaatcttcatacttatatggtttacctcatgagctatatactaaatatggggtaagaagatatggattccacggaacttctcataattatgtatctcagagagcagcagagatattaggaaaagatataaaagatttaaaaatagtaacttgtcacttaggaaatggtgcttctatagctgctgttgatggtggaaaatgtgtagatacatctatgggattcactccattagaaggattaataatgggaactagatgtggagatatagacccagctatattaccattcttaatgagaaaagaaggtttagatgctgatggattggataaattaatgaataaagaatctggagtatatggaatgactggaatttctagtgacttcagagatatagaagatgcagctaaaaatggagacgaaagagctcaggctacattagaagcgtatgttaaaaaagtacaaaaatatataggcgcttatgctgctgaaatgaatggattggatgttgtagtatttactgcaggcgttggtgaaaatggaaaggctataagagcagatattgcttctaacatggagtttttaggaatgaaattagataaagaagctaatgatgttagaggaaaagaaacagtaatatctactgctgattctaaagtaaaaatgcttttaataccaactaatgaagaattaatgatagctagagatacattaagattggtaaaataattaaattaaacctatgcctatcaagtaaaaatacttgacaaacaaatgctagatttgtataataaatttggtgatatgttgaggtgaacttaatgaaagttagcatagaaaaaataaatagaaaagaaactgacaaaatagacttgaatttttgtgaaaaaattgatactattagttattgtgatgagatttacaaattagtatcacctgtaaatttaaaagggaaagtgtcaaagactaataaaggtttgtatctagatatagatgtcaattttacaattgttgacacttgttcaagatgtcttaaagaagtagaaataccactagagtattctatacaaggttttttagtaaaagaagaagattatgatgaagatgagtttgaggaatttgatccttttatattcgatggtgaagaaatcgaccttattgatataatagaacagacattagattttaatgtacctcataaagttctttgtagtgaaaactgtaaaggtctttgtcaagtatgcggggcaaacttaaatgaagaagagtgttcttgcagtgaaattacaaacgatgaggaatacatagatcctcgttttgctaaattaaaagatttatttaattaaattttgactaaggaggtggcgtaaatggcagtaccaaagcgtaaaacgtctaaatcaaacacaaaaatgagaagagcagctaactcaaagatggaagcaacaggatttgtaagttgcccacaatgtcatgagccaaaattaccacatagagtgtgtccagactgtggatattataaaggtaaagaagttgtgtctaagtaatagcttctaaaaagcatgtagagtatactctacatgttttttttgtacatataaaaaaataagatgatttactagagaaaataagtggattttatgcatattaaaaaatagaaaaataataatataagtattgaaaatttttgtgtgttactatatactactattagtagctggtactaattacagctataaaatttggagggaacatgaaaaagaaaagtaaagcccaaagacaaaaagagcttatagatatgctaaagacagatcctttttatactgatgaagaattatcaagtctgtttgatgtaagtatacagaccataagattagatagaatgagtctaaacataccagagctaagagaaagagtcaaatcaatagcagaaactcagagttcaaaagtaaagactttaggagtaaaggaaattacaggagaaatcattgatttatctgtagggcgattaggtatatctatgttagaagttacacaggacatgatttactctaagactaatactttaaaagatacgtatattttttctctagcagattcattggcaatggctataatagatgcacctaaggttattatgagagttgcaaatgtaaaaagttttaagttgatagaacaacaagatagacttatagcaaaagcagaagtgtatagaaatatagataaaaagcattatgtaaaagttgttatcaacaataaagcccaagagcaaatatttagaggaaagtttatctttgaagaattagattaggagggaaattatgaaaatagtaattgatggaatgggtggagataatgcacctaaatctaatgtagaaggcgcagtaaatgctataaaagaatatcaggttgatttaataatcacaggagataaagatttacttgaaaaggaattttcaaattatgaatttgatagaaataaattagagatagttcatactactgagattatagaaaacgaagataaaccagtaaaggctataagaagtaaaaaagattcatctatggtagtagcattaaatcttgtaaaagaaggaaaggcagatgctataatatcagctggaaatacaggagccttacttgctggtggattatttgttgttggtagaataaaaggaatcgatagaccttgcttatgttcagcaataccaaatgtaaagcgaggaatgacacttatagcagactgtggcgcaaatgcagattgtaaacctaagaatctagttgaatttgcagctatgagtaatatttattcaagaaaagttttaggtcttgaaaatcctaaggtagcattagcaaatgttggactagaagaaggcaaaggcaatgatttagtcaaaaggtcatatgaagaaattaaaaaattagatttaaattttatagggaatgtagaagctagagaagttataaatgcatacacagatataatcatatgtgatggatttacaggtaatatattacttaaatctgctgaaggtgtagcactttcagttatgagtcttataaaggaaacttttatggccagtacaaaaagtaaaataggagcattacttataaaggatgatttaagaaaattaaaaagttttatagattattctgagtatgggggagctccacttttaggtctaaatggaggagttataaaagctcatggtagttctgatgctaaagctataaaaaatgctataaatcaaggaataaaattttcaaagggaaaagtcgttgaagatattaaccaatttataagcaaatacaatgaagaaaataaaaataacgaagatgaataaactcgttttggaggtttaatatataatgaatacaaaggctggaatattaggagtaggaagttatctacctgagcaatcatatgataattttcacttcgaaaaaataatggatacatcagatgagtggataagtactagaactggtattaaggaaagaagatttgccaaagagtctgaagcaacttctgacttagcatctaaagctgccttaaaagctatagaatgtgcaaagttaaacgtagaggatatagagctgattatattagctacaattactcctgatatgtctttgccttcaactgcatgtatagtacaagatgcaataggagcagtgaatgctactgcatttgatatatcagcagcttgttctggatttgtatatggagtaactattgcaaagcaatttgtggaaacaggttgctataaaaatgtgcttgtaataggagcagaaacttgttctaagtttttaaattatgatgatagaacaacagcagtattgtttggagatggagctggagcagctgttattggtcctgtaaatgagggtggaatactgtctacacatatgggctctgatggtaaaggaaaagattgtttaaaagtacctgctggaggttcaagacttaaggcaagtaaagagactgtagaagctaatctacatacaatagaaatggcaggtagtgatgtgtttaaatttgcagttagaaagatggcagaaacttctttaagagctcttgaaaaagcaaacctaaatacaactgatatagactacttagtgccacatcaagctaatataagaatcatacaagcttcttctaagagattagagcttgatatgaaaaaagtttatgtaaatatagacaaatatggaaatatgtctgctgcatctataccagtagcattagatgaagcttatagagaaggtaaaattaaaaagggtgataatgtagttttagttggctttggtggaggtctaacttggggggcttcagttgtcaagtggactttatagtataaaatatctaaaatgatttaattaacaaaattaaacttatacacaaaataaagttgattaataataaaaagtttacttttatgatttcaagtgaaggagaattgtatgaataaaatttgcaaaatattaaatataaaatacccagttatccaagggggaatggcatgggtagctactgcatcattagcaagtgctgtatctaatgcaggaggacttggcataatagcagcaggaaacgcaccaaaagaagctataaagaaagaaattgttgagtgtaaaaaattaacagataaaccttttggagtaaatgtaatgcttatgtcgccatttgttgatgatataattgatttgattatagaagaaaaagttcaagttattactactggtgctggaaatcctgcaaaatatatggatagattaaaggaagctggaacaaaggttattcctgtagtacctacaatagctttggcacaaagaatggaaaagttaggagctacagcagtaatagcagaaggtactgaaggtggaggacatataggagaacttactactatggtcttagttccacaagttgctgatgctgtaaacatacctgtaatagctgctggaggaattgtagatggtagaggaattgcagcatcatttgcattaggtgccagtgcagttcaagtaggaactagatttatttgcagtgaagagtgttctgtgcattcaaactataaaaacttagtactaaaagcaaaagatagagatgcaattgtaacaggaagaagtactggtcatccagtaagaacattaaaaaataaactatcaaaagaatttttaaagatggaacaaaatggagctactcctgaagaattggataaaaaaggtacaggagctttaagatttgcaacagtagatggagacatagaaaaaggttcatttatggcaggtcaaagtgctgctatggtaaaagaaataacaccttgtaaggaaattatagaggctatggtaaatcaagcaagagagattatgccagcaatagaactgtaaatcaggaggagcaagatgggaaaagttgcactagtattccctggtcaaggagctcaatatgtaggtatggccaaggatttatatgaaaataatgctgttgctaaaagtgtaatagatgaggctagtgatgccttaaatatggatttaaaaaaccttatgtttaatggaaatgaagaagaactttctaaaactgaaaacactcaacctgctatggttacacatagtgtagcagtattaaaagcggtacaagctcaaatagatttaaaatataatgcatgcttaggattatccttaggagagtatagtgcgttggttgcagcagatgcaattgactttaaagatgctgtatgtttagttaaaaaaagaggtaagtttatgcaggaaacagttccagcaggtgttggagctatggcagcaattttaggtttagatagaaatgtacttgaaaatgtggttaaagatatacaaggaggtattgtagaagtagcaaattacaattctcctggacaaatagttatatctggtgaaaatgaaaagatagaagaagcaatggtaaaatgcaaagaagcaggagcaaaaagggcagttaaattaaatgtaagtggaccttttcactcatcaatgttaaaagaagctggtgtaaaattggccagtgaattagaaaaagttaacataactaaacctaaagttgatgtggtggcaaatgtaaatgcagattactataaaaacgaaggtaaagacctgcttataaaacaagtaagttcatctgttctttgggaagattctatagaaatacttttaaatgatggatatgatacttttatagaaatgggacctggaaaaactttaaaagcatttattaagaagatagcttccaataaaaaagcaaatgtcaatatttataatatagatggtatagattctcttaatgaatttgtacaaaattatagaaatggagagatataatgataaatcttacaggacaagtagcagttgttactggtggctctaggggtataggaaaagaaatagcaaaaaaactagcatcttttggagctgatgtagtaatcaattatacttctaaagaagatgaagcactaaaaactaaaaatgaaatagaaagtatgggggtaaagtgtacctctataaaatgtgatgtgtctaaatttgatgaagtgaatcaaatgatagattctgttgtaagcgaatttggaaaaattgatatattggttaataatgcaggcataactaaagatggtctgcttatgagaatgaaagaagaagattttgatagagttatagatataaacttaaaaggtgtctttaattgtacaaaagcagttactaaacctatgatgaaaaagaagtatggaagaataataaatatgacttcagtagttggaattatgggtaatgcagggcaaactaattattgtgcatcaaaagcaggtgtaattggatttacaaaagcttctgcaagagagttagcatcaagaaacataaatataaatgcagtagcacctggatttatagaaacagatatgactagagtactaagtgatgatgtaaaagaatcaacactagcaaacataccaaagaaatcttatggtaaaccagaagatgtagccaatgccgtagcatttttagttagtgacatgtcaagttatataacaggacaagtaataaatgtagatggtggaatggtaatgcaataataatttaaaaagtagagaaatctattaaaataaaaaattttaggaggtacacaatgtttaataaagttgtagaaataataatagagcaattaggagtagaagataaagaaataactatggagacatcattaatgaaggatttagaagcagattcattagatgcagtagaaataataatggcacttgaagatgaatttggtatagaaataccagatacagaagcagaaaacttcaaatctataggagatatagttaagtatatagaagctaataaatagtcgagctttaaaaaagtggaggtatccgatgaataaaagagtagtaataacaggacttggatgtgttacgccgttgggaacgggaaaagaagagttctggagtaatataaaatctggagtatctggtatagataaaataactaattttgatgctagcacatatcaaactcagatagcaggagaagttaagaattttcatccagaagaatatataagtaaaaaagaattgaagagattagataaatttgctcaatttgcaatagtatctgctaaattagcagttgaagatgcaaatcttgatttagataaagttgatagagaacgttttggtgttataataggttctggaataggtggagttgaagctatagaaactcaacataaaattcttttggaaaaaggaaataaaagagtaagttcactttttgtacctatgatgataggaaatatggcagctggtcaagtttcaatatttttaggagcaaaagggcctaacactaatgtatgtacagcttgtgcatcaggaactcattcaataggtgatgcttttaaggtaattcaaagaggtgatgcagacatcatggtagcagggggctctgaagctgctgtaacaggtcttgcttttgctggattctgtaacatgaaggctatgtcaactagaaatgatgaccctaaaactgcatcaagaccgtttgataaagacagagatggttttgtaatgggagaaggagcaggtattgttatcttagaagacttagaacatgctttagcaagaggggctaaaatatatgcagaagtagttggatatggtttaactgctgatgcataccatatgacaactccagctgaaaatggagagggagcagctaggtctatgaatatggctttgaaagatggaaatgttccattagaagaagtagattatataaatgctcatggaacttcaacttattacaatgatttatatgaaactatggctataaaaactgtatttggagaaaaggcatatgacttatgtgtgtcatcaacaaaatctatgactggtcacttattaggagcatcaggtgctatagaggctgttgtttgtgctatgagtatagaagatagttttgtgcctccaactataaacatacaagaagttggtgaagatttggatttagattatgttccaaatcaaggtaaagaaaaaaatattagatatgcactatcaaattctttaggatttggtgggcataatgctacaatagtactaaaaaaatatgtataaataaatattaaatataaaactaaaaaacaagcacttgttttaactgtataaatttatattagcttaaatttaaagtctcctaaattattttaggagacttttttattaagatttaagtctagcatatgttgtaaatcattttgatatattgtattattaattattaagaggttatttatatatgcaagttttcattctacaatatacaaaaggaggactaaaattttgaattttagactaccaaagaaaaggttacccaaaaagataatttttatatgtataatacttattagtattattttgtttataaagtatgaccaaaatggattgaaagaaagagaaattataaataagggaaaatatatgtctgaaagccttgtggcagataaggagtatgatgaagcaaaaaaagtggttaagacttctttcgaatctattccagaaaaaaaatacaataaagtatataatgaagtttgggatatgttaaagactatttcatatgttccagatggaacgaagatagtcattgattctttagaaaagatgagagaatcagatgtgaaattatctgatgaatgtagatttaatatagaaaaaagattagcatcagtgtatataatggataataattattctaaggcagtagatttaactgtaaagtctataaaattggctgagaaattggggaataattatgaaaaagcaagactagatgttgatttggcgagcatatttttaaatataggtagctatgaaacaggagagaaattaataaaggattcttttaaaatagatattgatgaaggtgaaaaaaatggaatggttagattatatgctattataaatctagcagaaatatatgtagaagagggagaatatgataaagctattgaaataagtagcaggataaaagattataaaaagtttgtaaatacggataattacaatgattttgatataatggcctctataatgaagtcaaatgcgtatgtgggcaaaaataatatacaaaaggcaaagacttttttagaaaaagctgattatcttataaaatcagatagaacagtttatatattagataaagatatgtactattatatggcaatgggaaacttagaatataaaagcgaaaattataattctgcaatagataattataaaaaaagtttagagatatctaccaaaagaaagttaactcaggagaaaataaaaaatttaaataagatattaaatatatatgaaaaacaaggaaatatagaatctttaaatgagtatcaaaagatgttaataaatgaatataaagagaacaaaagtataagagattcagagactagtttctatataattgataaagtatcaaacgaaagtaagctatttgaaaaaactaaaaaagaaataaaatattataaaatattatttacagtaattttaattgctatattagggtctacttttttatacaaccgattgaagtattttaaagcacaaaatttacatgatggtcttacaaatgtttataatagaaaaagttttgatattatgtatgaaaagtacagagagaaagatgataattttgcacttgtgatgatagatattgataatttcaagctcataaatgataattatggacataaatttggtgacactgttataaagggaataacaaataccatttgtgttatgttagaacaagatgataaagtctttaggtacggaggagaagaattttctgtattaataagaaataaatctggtgaggaagtagcagatataattgacaatataagggttgcaattgcaaataaaaagtggaatgatgatgtgactgtgactataagtgcaggtgtagctcatatttcagatagcaaagatgtactagaagaagctgataaaaatttatataaagcaaaacaacttggtagaaataaagtagtatataagtaattatatactatataaataagaggtataaatatgaaacaatcaatagctatagtaactgataaaataactaaactatcatctttcttagaagaaaatatacgtttggttttaggtaattatattgatataaaccactattatctggaagttttaaaagagaatgataaaatacaaggtgattttgtactagtaatgaatgatgatagattaaacagtatgagaaagcatttagtacaagatagtaagattatagtgataaggagaacacttaaagaaaatgaaatatatggattattttcaataccaaatggaactgaagtattggttgtaaatgatacaaaagaaactaccttagaaacgataagcttattttacaaaataggagtaaaaaatttaaagtttactccatatattgaaggaaaaatttataaaaatatagacatagctataacgcctggagtaaaggaaaaagtaccaagttatataaataaagtaatcgaccttggtaatagatatattgatatatctacttttatagaaataataaatggtcttagaattgatgttaaagaaatacgtaaaaatttaatggcatattctgagagtttaataagtttagataatggagttaaagataattataggcaactgtttttaaaaatagaagaacaagatgttatattgaatctatcaaaagatggaataatatttacttcagcagatggtataataaacacatttaataaagaagctttaaaaattttaggtataaatgaaaatccacaaggcaaaaacatagaagatatcatttctgaagatttaaatattttacttgaagacaaagaaataattgatgaagtggtatttacaaataaaaaatatataaatgtaaataaaaaaagtattttttctatggggaataaagctgggatatattataacttacaagaaataacgtatataaaaaaattagaacaaaatcttactaataaattaagagaacaaggtcagatagcaagatatacatttaaagatataaaaactaaaaataaaaatatggtaaagtgtgtagaattggctaaaaaaatatctaaatcagacctttctgtattaataataggagaaagtggtactggtaaagaattattatcacaatcaattcataatgcttccaatagaagtaatcaaccatttatagcggttaattgtgcagcagttccagatagtctattagaaagtcaactgtttggatatgaaaaaggctcttttacaggagctttaagagaaggaaaaaagggtctatttgaacttgctaataatggaactatatttctggatgaaattggagatatgcctccattgctacagacaaagttactaagggtattacaagaaaagcaggttatgcctataggttcccataatgttataaacatagatgttagggtcatagcagcaacaaacaaaaacttactaaagatgattagagaaggaaaatttagagaggacctgtattatagactaaatgtattgccaatagatgtaccatcattgaggaatagaaaagaagatataataacacttatgaatttctttttgaaaaacaatgtaagactttcgccagaagttataactattttagaaaaatataattggccaggaaatataagagagttacaaaatgttgcttcttatgtaagtctaatgtgtgatagtatggtttttagagatgacttaccaccatatataagggtagaatgtgctaacaattatgaagatggatttggttatacaaaaaaagaatttgaggaaatactgaggattctatatgaaagaagagagtcatcctctggagttggaagagggtttataatcgaaaagcttatacaggaagggattgagatttctgaaagcaaagttagaaaggtgctatcttatttaagtgaatgtggatatatatcatctaaatctggtagaggaggaagtcaaataacctcagaggggataaaactttataataatataaattaagctaagtatttgatattgaaatcacatattttgaatttagatatttaaataataaacttttatatttatagagattaatttatactatgtcagaaagaatattgtaatttataattaaatattaataggtttttaaaataggattagataggtaataggttaagttagaataacccattacctatttttatttgtaagaaaagtgtacatagagttaaaagtaaaaaatacaactaataaaactattgaaaacactagataaataataaataaaaataattataaattttggcatatatattgctaatcatagagataagacgacaaaataattgggaggtttaatgatgaaatacaaaacaacagggacttgtgctacagaaattgaatttgaagtaaaagaaaataaagttacaaatgtaaactttataggtggatgtgatggaaatttaaaagggctaaaagtattagttgaaggcatgaatatagaagatgtaatacaaaagttaaaaggaatagagtgtaaaacaaagccaacatcttgcccagaccaactgtctctagcattggaaaattatatgaatataaagtaatacataaaacaatcgattagttaggagtttaattatgaaaccaataatagggattttaggaaatttaataataatggaaaatggtatgtttccaggtcttgaaaggtcatatgtaaataatgattatataaatgcagtgctaaaaggtggcggtagtccagtaataattcctgtaaatacagataaagaagttataaaaaaacagattgaaatggttgatggagtcttaatatctgggggatgggatatcaatcctcaactgtatggagaagaaacaagagaagaaacgacatttatatatccagaagtggatgaatttgatttaattgcaataagtatagcattagaacttaaaaagcctatattaggtgtatgtaggggactacaaattttaaatgtaagtttaggaggaactttatatcaagataataatcttatagaaggaagttatataaaacatacacaatcttctaaaagacatgtagctactcataaagtcgatgttaaagaaggaagtattttagagggaattttaggaaaacaattacttacaaatagttatcatcatcaaagtgtcaatcagcttggaaaaggattaaaagccatagcatactcaaaagatggtataatagaagctattgagaaagaggaggaaaattttgtagtaggagtacagtggcatccagaaatgatggtagattactgtgataaaatggaaaaactatttaaatattttataaatatttgttcaaatttataatataccttggggggattgaacatgaacgaaaagaacaaaatgggattaataagtattatacttttaggtattaatgcagtagtaggagctggagtttttctattaccaggagatgcaatgaaatcatttggtgtagcaagtatatttgtatatatatttgatatgttgttagttttatctatggcattctgttttgctgaggttgcaggtaaattcaataaaaatggcgctgcctatgtatataccaaagaagcttttggagatttttgtggttttgaagtaggtcttatgaaatgggtaataggatgtatttcttggggagctttaatagtaggttttcctacatcattatcagcagtatgggctccagcaggtgaaccacatatacaaaaaattataattgtagccatgatagttgggcttacaattataaacttattaggtgtatctctatcaaaaattgtacaaaatgttataactgtaggtaaactaattccattaatactatttataggaataggtatattttttataaaaggagttaattttacttcttcaacaatggtacctccaggagctggagcaacagagtttggagcagcagcacttttaatgttttattcatttacaggatttgaatctatagcagttgcagcagaagatatggaaaatccacaaaaaaatataccaatagcaattataagtgtaatagtaattgcatcaataatatatatattaaatcaagttgtatgtgttggtatactaggagattcgttatctagtacatctacaccagtggcagatgctgcaagaatatgctttggaaatatgggagctggattggttacctttggaacattggtttctgttggtggaatttgtatgtgtggtgcttttgtaaatccaagaagttgtgtagctttagctgatgataaaatgttaccaagaatatttgcaagaaaagataaaaaaggtacaccatatgtagcgataatagctactatgttaatcactataccaatagctctatctggaagttttgctgaattagcagcaataagtgcagttgctagattcatacaatacataccaacatctttatccgtattagtgtttagaaagaaaagaccagaattagtaggtacttttaaaactccttttggagcagtgattcctctaattgctgtatgtgttggaacatggttgttattccaagcatctatgcatcaattaattatgggattaggagctttggcaattggagtaccattatactttataatgaagtcttataatagaaaagtctgtggtgaaaatttaaagaaaatagtttaattatgttataagaatttattgagttaaaattagacattggcagaaaattaaatacaaataagtatctataaggctatattaaaatattattaattttttattttaatatagccttatattgttatcaataaatgaaaaatattgtaacaacagaagaacaatagtattatgtttatagataaaaaacttattaggaggtaaatttatgccaacaataacattaaaaaatggtgtagacgtacttattagagaaggtgtaagagaagatgcttaaagcattatagatttttataatgaagtgggtggagaaactcattttctgtcatttggaaaggatgaatataaaatatctttggaggaacaagaaaatgctatagaatcagcaaaagcatctgataattctgttaaactgattgcatttatagatgatgaaatagttgggattgcaacgattgattctaatcaaaaagcaaaaggaaagcatgttggagtattaggaattgttgtaaaagaaaaatattggggaattggattgggtaaaaggcttatgttagaccttatagaatggtgtaaatcaaatggaataaccaagaagataactcttgtcactaatgaagaaaattataatgctataggattatacaaaaaagttggatttgaagtagaaagcatactaaaaaaagaatgttattataatggtgtttatactgatttaataggaatgtcacttttattgggaatataattagtgtacattttatctcgaaaaaagtatattaagtatggtataattaaaaaagaatataacttaatataattttggaggacgaattatgaaaaatctgtgtaaaatatcagatgattatttaaacagcaagcttaagtatttaaagttattatcaaaacaatatccaagtatatcaaaagcaagtacagaaataataaatttagaggctatattaaatcttccaaagggaacagagcattttataacagatgtacatggtgaatatgaaccatttgtacatgtattaaaaaatggttctggtgtaataaagagaaaaatagaagaattgttttcaaatacaataagagacagcgaaaaaaaaatgttagcaactcttgtatattatcctgaacaaaagttagacctaataattaagcaagaggaaaatatagatgatttttatagaataaatatttatagacttatagaactttgtaaatatgcttctagcaaatatactaggtctaaagttagaaaactgttaccagaaaattttaaatacataatagaagaacttttgcatgagcatgttaaaagtgaacataaagaagagtattataaaagtatagttgaaacaatagttgacataggaatagctaaggagtttataattgctatttctacagttatacaaaaattggttgtagatagacttcatgtaataggagatatttatgatagaggtccaagaccagatataattgtcgataagcttattgaacatcattgtgtggatattcaatggggaaatcatgatatattgtggatgggtgcagcctcaggtgaaaaaacttgtatagcaaatgcactgaggatatcagctagatatgcgaatttagacattgtagaagacatatatggaataaatctgttgcctttagccacttttgctatagaaatgtataaagatgacccttgtaaagaatttattccaaaggttaatgaccaaagtgtaacaacaacagaaaagtctttaatggcaaaaatgcacaaagcaataagtataattcaatttaagcttgaaggtgaggttataagacgaagacctgaatttgaaatggaacatagacttttgcttaatatgataaactatgatgaaggtacgattactttaaaaggtaaaacatataaattaaaagatacttatttacctacaatagacaaaaaagacccatataaattaactatggaagaaagaaatgttattgataaattagtatcttcatttagaggtagtgaaaaattacaaaaacatgtttcatttttgttttctaaaggaagtatatatttaaaggctaactcaaatttactgattcatggatgtgtaccattaaatgaagatggaagctttatgtctatgaatataatgggaaaagagtataaaggtaaggctcttatggataagatggagtctctagcaagagaaggatttttctttaaagataaggcagaagaaaaactatatggtatggatattatgtggtatttatggactgggaaatgttcatcattatttggtaaagatgatatgactacatttgaaagatactttatagaagaaaaagagactcataaagaaaataagaatccatattttaaacttagagaaaatgagatggcttgtaaaagattatttgaagaatttgatttagagcttgatgaatcccatataataaatggtcatgttcctgtggagagtaaaaatggagagagcccaataaaagctaatggtaaaattctcgttatagatggtggtttttctagggcttaccaaaaaactactggtatagctggatacactttgatatacaattctagaactttgcaattagtatcgcatgaaccatttaattctgctgaagaagccattgcaaatgaaagtgatatcttatcgacaactgttgtagtagagcataaggcaaagagaaaaatggtgagagatactgatgaaggagtaaaaatacaagaggaaatagaagatttaaaactacttttaatggcttataagaaagggctaataaaagaaatgtagatattatagaggcacttcataattgaagtgtcttcttgttaatacttattaaatatattataaagattaataatagtagtttatattatacttactaagtgaatccaagataaatgggttcactttttttatttataaacattattaaaaaaatatagatgttttggttatattccttgtcctttataaatagaattatataaacaaaggaggaggacaagagatgaataaactttctgatgaaataataaactctctttctacaactataagagaaaaggtagaaaaagtctcaaacaataatctgaacatagaagaaattaggttacgctcacaaaaaccattgatactaaatgcaaactctaaagattatttttacaatcaaaaaactatgacacttgatttaaatcaacaaaactcatatgtagtaacaagagaagatgtagagcaaacttttcaaataatatgtaaatattcaatacattcatttatggatgacataaaaaaaggattcataactttgagaggaggtcatagagtagggttagttggaaaagcaatagtagaagatggacaagtcaaaaatataaagcatatatcatctttaaatataagggtatcaagggaaattattggatgctcggataagattttaagtcatattataaagggaaaaaatcagattaataatactttgataatatcaccacctcaatgtggaaaaacaactttaataagagatatagtaagaaatttaagtaatggtaatgaagattatggatttaaaggtttaaaagtagctttggtagatgagcgtaatgagatagcaggagcttatctaggtgttccacaaatggatgtgggaataagaactgatataatagaaacttgcccaaaagatttgggtattacgatgcttttaaggtctatgtcaccaaatgttattgtgacagatgaaattgggagtgaaaaagaaataaaggcattatacacagcattaaatggaggtataggattaataactactgtgcatggagattcaatagatgatatacaaaatagaaaagaattaaatagacttctggataaagagttatttaaaaaggttataattctttctgcaaaaagaggagcaggaacgattgaaaaaatttatgatttagaagaaaagagatggtattttgcaaattaaaataattattatagctctcttggtaggaagtagttatttgataggtgaacaaatatacaaaacttatactcgtagacataaacaattaaacgatttaataagagttttagaaattttgaggatggatttatctttcggactttatacattagaagaaatctttaataggataggtggaaataaagagttttgtttttggaaatttttctatcaaatatcagaaggacttcacaatgaacaaagtaaaactttggaaataataatatcagaaaatattgatgtcttaagtaaagaaacttatctaggcaataaagaaattgaggaactgaaaaatctaatacttactttagggaaaagcgatatagagtcacaacaaagaatgatagatttatctatagaaaatttgaaaaaacaaacctatgagacaaaggaagatataaacaaaaaaggcgtattgtataaaaaattagtgacattcataggtataggtatatgtattatattgatttaatatggggaggtttattatggaaatatcattgatattaaaggttgcaggtgtcggtattctaatatcagtattgaatatgatattggaaaaaacagatagaaaagattgggcaggtcttactacattagcaggtgtaataatcgtattgggtatggtaataacagaaataagtgacttgtttaatactgtaagaacaatgtttcaactttactaaaaaggagggagtaatttggaaataatgcaattaataggaattgcaatcatttcaactacactctgtttagtaattaaaaaagatagaccagagatagcaaatttcatagcaataataactggagtaataatactattgtcagttatgtttaagctaaattttatagtagatagtatacaagatttggctaacaaggctaacataccgactatgtatatatcattaataataaaattaattgggatagcatacttaatggaatttgcgatacaactttgtaaagattgtggggaaggaaacattgcttcaaaactagaatttggaggtaaaataatagttatgtcaatgtctttccctatacttttgtccattgtagaaatggtggtgaatataattccatagatgtgtatcttggaatgaatataagtatattagagaactttcgttgtattgaggtttatagagtgaagagaggcatggttgcttatgaaaaaaagatttttaccaatgattataggttttttatttactttcttttttgtaaatatctttgctattatgatatttgctaatgaagtaccaagtagtgaagataaagaatatggtgaaacaaaaaatagcatagataaatatatagatggtcaattagacaagctagatataaatgagattcaagactatataaataaagaaatagttattaatgatgttaatttaaaatcatttgtaaaagatttaattagtggagaaaaaaatatcttagatttattcaataaagatggattgaagatattgatgtttgatgaatttaaagcaagtttaaaggtagtagcagtaattttggtactggctctgttatcatctattttaaagagtctggaaaactctttttcatcaggtgcagtaagtcaaatagcaacatatataatatttatcacaatggtatcacttacacttattggttttaaagatgtattacagatttgttatgatgcaatagaccatactgtaggtcttatgcaagttataatgccaatattaataacatttttacttttaattgggttcccaataacgtcgactactttgaatcctatcttcataggaggagtaacatttataaatgtattttttaaaaattttctatttgtatctattactgttgcatttggaattttaataataaacaatttatcaaaaaatataaggctaaagagatttttctcctttgtaaaacaaataaattatgtttctattggagctatgtttactgtttacttaggtcttgtatccatacaaggattgtatgtaaccagttttgataaattcagtgtaaagactgctaaatttgctataggtaattttattcctgttgtaggtggatttgtatctgactctgtggatattttattatcttcatctcagcttataaaaaatatatttggaggaatagggcttatcttacttgttggaatttgtttacttccagtaataaaaattttatcagtaatagtagtgtacaaattagcagcaataattgtagagcctgttggagaggatggaatatctaattttttaaatgaagtggcaaatttaatgataataatgctagcatcagtaattgctataacagtaatgttctttgtaactgtagctatcttgacctcgataagtgtcgtaagtcaagggtaatttatatatcagtgaaaaataattacatttaatctaatgtttttagagaggaggatgctatgttagagggcataaaggcatggatagttagtgttttgataggagcatttatagtaaatatagtagatatgattttaccaagttctaagataaaaccttatgtcaacctagttttaaactttatgtttgtatttattgtaataactccagtagtaggatttttttcaaaagatatgagtttagaagatagaatattaaaatctatgggaaactacaacaagcagtatgtagatagtacaaatgctttggcaaaagagactggaaataatagtctatccaagggatatgaggatgggttaaaagaagtacttaaattaaaacttgatgaatatggttatgatttagaagatatagagcttaatggggcaaatataaataatataaaaataaaagaaaagaataatagtgcaaaaagtaataacagttccaatgaagaaaataaaaataatagtactaaaagagaggaagaaaacataaactctaatgacaaagaaaattctaaacaagtcttcaaaaaaggtacagagtatgggttgaacctaaatgaagaaaaattaaaaaacgacttaataaaggtgctggatgtttctatagaagatatacaaattgataaataggagttgggagaatgttgaaaaacttaaatgacaaagataagagaaaggtatattcactaataactatagcaggaatatgtgtggtttcattagtattattatcttgttttcctagtagcaaaagtgataaacaagttggaaaaacagagactaataaaaatgctgaaaagcaagtcactaaaaaacaagaaaaagatgatttagagtcaaaattaacagcaatactatctaaaattgatggtgcaggagacgttgatgtaatggttacatttgaatcaagtgaagaaatacaacctgcttttaattcaaataatacaacagaaacaacagaggaaaaagatgcacaaggtggagaaagaacagttacgacttctagtgaaaataaaacaatgataacttcaaattcaagtgaccctgtagttataaaaactacagagccaaagataaagggagtgatagtggtagcaagtggagcaagtgacccaagtgttaaagagacactttatagtgcagtacaaacatcattacaagtagctggtcatcaagtagaaatatattctaaataaatacatataaccggggggataaatgaatgaagtttaattataagggaagaggatttgtaataataactttaactgcaatgttagtggtagtaggaacagtgaattatcaactaagtaagaaatctttattagaaacatcaaaagagtttaaggcatatgaagaagcacagttgcaaaaaaatactgatgatagtgatagtagtaagacagaggattctagtaatgtagataaacaaggtggtaaggaaagtgctgatattgatatagtcgatagcaaagctagtaaagtaaaagaaaaggcaactgagacaagtaaggaaataaaagctcaattatcatcagagaaaaatatgaaaaaggcatcttatattttagatatgaaaatgaatagagaaaaacaaagaaatgagttagttcaagatttaaatgaaatgataaataatccatctacaacagaagaatctagaaaagaagcttctaatatgaaattaaatatagttaaaattcaagaaaaagaacttcaaatagaaaaccttttgagtacaaaaggatatgaagaagcgttagtttatataagcgataacaaagttaatgtagttgtaaatgaagctaaattagaaaagaaagatgcagcaaaaatatttgatttagttgcagaacaagccaatgtgaagtatgaaaatattaaacttacaaataataatagtaataagtaaagtataaacctcagaattaactgaggttattttcttgcaaagtagacttgtatttggtattattatacttataaaaatagttccttaaaatcaggaggtaagttttaatatggaagataataaatttggacaagtaaaaatatctaatgatgtaatagctacaatagctggtttagcagcattagaagttgaaggcatagaaactacagcaacattaacagataagttgttaaaaaataatggagtaaaaatacaaatcgaagaagaggatgttaatttagatgtaatggttacgataaagtatggaatgtcaataccagatacagcttttaaagttcaagaaaatgtaaaaaatactgttgagacaatgacaggactgaaggtttctcaagtaaatatacacattcaaggaatcagctttaagaaggataaagttgataaagaagaagcaaaagcaactaagaaaaattaatattagccctctgaaaagtcagagggttttttgctggtaattgattttatatggataattaaacttaaaggagaattttgattgatgaaaaaagatagggcacaaaagagtacaacaagagaatatataatgaaacttatataccaaataaatattaataaagaagattttgaaactttagaagataaagtagataattttttaaaagataattcagaacatattataaatagatataaagaacttgcacttcaatactcaaaaaatacaaatttaaagttagaagatactgaaattgaagatgttatagacaagaaatatataaatacagtatgcaaagcattaaaagaaaatcatgacaaaatagatgagttaataaataagcatgctaaaaactggacagtagatagaatgccaaaggtagatgtttctatacttagattgtctgtgtgtgaaatactttatttagacactcctaataaagtatcaataaatgaagcggtagaacttgcaaaaatatattgtgatgataagtctcctaaatttataaatggtatattgggaagtgttgttgatgaaattgggaaataatataataattggaattgatactagctgctatactacttctatagcagctatctctttagataagaaagttatattcaatgaaaaaataatgttagaagtaagggataattcaaaaggtttaaggcaaagtgaagctgtatttcaacatatcaataatttagggattcttagtgataggataaaatcttttaaagataagtttaatgtagaaggagtttgctcatcaaaaaaaccgagacctgttgaaaactcatatatgcctgtattcaatgtaggtcataattttggaaaattattgtctagtatatatggttgtaggttttatgagactactcatcaagagaatcatattgaagcaagtttattaaatagtaaattaaaaaataataataaatttatttctgttcatatgtctggtggtactacagagatacttttaacaagcaaacaagatagtcatcacaatgtatgtgatactaatttaggtaaaattgccaaaataagtattaaaaaagatgataaaagtaagttatacaataattttggatataatatagatataattggaggaagtaaagatattagctttggtcaactcatagatagagtaggaattaagcttggatataaatttccttcaggaaagtatttggatgaaaatgctttaaattgtaatcttaaaatagaaagtggtctgaaaacttctgtaagagatgggtatatgaatttatctggattagaaaatcaggtaaataagattataaatgataatggagataatactaatcaaaaagaatacatatctaaattagtattagattcagtagttagaaatatgtttaaatctttagtatatttatgtgaaacttataatgtaaatgaagtagtatttgctggtggagtttctgcaagtaagtatattcttagagaattaagcatgaagttaagaaaaaagcatatagaagcttattttacagaaccacaatattcaactgataatgctgtcgggtgtgctataataggattgaataactttttaggagaaagagtatgaaactaagagctttagatataagtgaagcaaactcatatattaaaagaattttaataaacgacccaatactttctaatcttaaagttaaaggagaaatttctaattttaaggttcatagtagtgggaatgtatatttatcacttaaagatgaaacatcaaagttaaactgtgtaatttttaaaagtaattttaatcgcaatttaaaattagataatggtgtaaaaattatagctaatggatatatatcagtctatgaaagagatggtgcgtatcaattatacattaatgaaattgaaatagagggaataggaaatttacacatagagtttaatagattaaaggaaaaacttaataaagaaggattatttgaccctaaatacaagatacctatacctaaaatgccaaactcaattggcgttataacatctccaacaggtgctgttataagggatataataaatgtaataaaaagaagatatccgaaagttaatataaagctttatccagtaatggttcaaggagataaatcagctgaagaaatctgtgaagcaattagatttttcaatcatatgaagaatgttgatacacttatagttggtagaggtgggggttcaatagaagaactttggtcttttaatgatgaaatggtagcaagagaggtttttaattctcaaattccgataatatcagcagttgggcatgaaacggattttactatttgtgactttgtgtctgatatgagagccccaacgccatcagcagcagctgagattgctactccatcattggatgatataaactataaacttggaaacataaaaagtaggatgagtaagtctcttacaaatcaaatagagctagaccaatataggttagaaacagtatttaataagataaataactatttagattcgtacacaataaaagataaagttatacaattagacaaaatatatgataaaataatttttggaatagaaaataatttaaaattagaagatgaaaaattagtaaaaattggagcattactccataatttaagtccattagctactatggatagaggttatagtataactcaaaaaaatggaaaagtaataaatagtataaaaggattaaaaataaaggatagtatagatatagtattaaaagatggaaatttagaatgtatgatagataaaattgaaaataaagagggatagtatgaatttaacctacgaagaagcttataaaagattagaaagtattttaagtgaattagaatctaaaaatgctagcttggatgaatctttaagcctatatgaagaaggtataagcctttataaacattgtaataagcttttagatgatgctaaattgaaaataagtaaatttaatcaattaggaatagaagaagactttaaaatagaggaggaataaaattggaatttaaacaatgtctaaaagaaaaagcaagttttgtagaaaaagtacttaaagaatatatgcctaaagaagaagggtatcaaaaaactgttattgaagctatgaactatagtttaagtgctggaggtaaaagattaagaccaatacttacattggaggcttgtaaaatagttggaggaaatgaagatgaagctattccttttgctattgcaattgaaatgatacatacatattcactaatacatgatgatttgccagctcttgacaatgatgatttaagaagaggaagaccaacaaatcataaagtatatggagaagctatggggattttagcaggagatgctttgttaaactatgcttttgaagtaatgcttgcaggctcaatcaataaagaaaatccagaaaagtatctaaaagctataaatgaaattgccaaaggtgctggtatatatggaatgataggtggtcaagtagtagatgtagaaagcgaaaataaacaaattgaaaaagaaaaattagattatatacatatgaataaaactgctgcaatgatggtaggctgtatgagagcaggagctactataggtggagcaaattctgaacaaatggaagaaataactaaatatgcaaaaaatatcggattatcattccagatagtagatgatatactagacatagtaggagatgaagctaagttaggtaaaaaggttggaagtgatatagaaaatcataagtcaacatacccatctcttttaggtttagataaatctaaagaaattgcacataatttgattgatgaagcaaagaaaagtatagaaaaattatctgatgatgtagattttttaaagggattggctgaatatataatagatagagaatactaaaatatacagctaaaatcgaggagggaaaaatggattttttttcggagatttttaacaatggggctttgggaataagtctgattgcttgtttcttagcacaatttataaaaatatttactggtaaggaaaaaagaattgagttatcaagaatacttatttcaggaggtatgcctagttcccatagttcttttgttacaagtttagctacagtggtaggtattgaaaaagggtttaattctactgattttgctataattaccgtacttgccttaattataatgtatgatgcagcaggtgttagacgagctgttggtaaacaagctactatattaaatcaaatggtggcagatatacagcatggaaagcatatagagcagaagaaattaaaagaattaataggtcatacaccactagaagtttggtttggagctttacttggaatagtaacagctttaatattgatgtaaattgaaaatttacagaataaaggtgaggataatatgtataaatatttagataaagtaaattctccaaaggatataaaaaatatgagtatagaagaaatggatttacttgcaaaggatataagaaagttcttagtaaaatctgtttcaaagacaggaggacacttagcttctaatctaggagtggttgagttaacattagcacttcataaagtatttgatagccctaaagataagattgtatgggatgtagggcatcaatcttatgttcataaaatagttactggaagaaaagattgttttgtatctttgagacagtttaatggactaagtggttttccaaaggagaatgaaagtcctcatgatatttttgatacaggacatagcagtacatctatttctatagctacaggtattgcctgcgctagggatataaaaaaagaaaactatagtgttatatctgtgataggagatggttctataacaggaggtatggcacttgaagctttaaatcaattaggatatatagataccaatatgatagtaatccttaatgataatgagatgtccatagataaaaatgttggaggaatgtctaaatatctgtcaagtattataagaaactcaacagttgagaaaatgacagatgaagttgataaaattttaaatgttacacaaacaggtgaaattttatctaagactgcacatagatttaaagataaactaatgtatagcttttctcctcaggactgttcattttttgattcattaggtataagatattatggacctatagatggccataatactaaagaactaatagatatattgagaaaagctaaacacaaaaaagggcctgttcttttacatgtaattacgaaaaaaggaaaagggtacagatttgcagaagaacaacctgataaatatcatggagtatcaaagtttgatataaagacaggtgttacatctgcaaaagttaagtctatgtcaattagtgttggagaaaaacttgttgatatggctaataataatgaagatatagtagcaataacagctgcaatgccatctggtacagggttaaacctgtttgaaagtgcatatccaaaaagatattatgatgttggtatagctgaacaacatgccacaggatttgcagcaggtcttgcaaaaaatggtatgaaaccttactttgctgtgtactcatcatttttgcaaagggcatatgaccaagttattcatgatgtatgcataacaaaaaagccagttacttttcttatagatagagctggattagttggaaatgatggagaaactcatcatggtatgtttgatttaagttacttaaattctattccaaatattgtagtaatggctccaaaagacacaagagagatggagcttatgatggatttgtcattaaaattagattgtccactagcaattagatacccaagaggaagtagttattacctagataagggagaatatggagagattgtactgggtaaatatgaggtattagatgacggtcaagatacagtcatactttgtattggaagtatggtaaaacatgctttagaggctaaagaaatattatcaagagaaggaataaatccgacaatagttaatgctagattcttaaagccaattgatgaaggtatgttaaaagcattattaaaaaatcataaaaatgtagttactatagaggataatattgtaactggaggatttggaagtagaataaacaagtttattatagataatgaatataacgtaaatatacttaatatagcaataccagaagaatttgtaaaacatggcaatatagatgaattatatgattttgtaggattatcgccaaaaagtattgctgataaaataaggaaattagttattgagtaaaaatctaatgtagatattgtaaattaaaatttatataaaatatagaatttatcaattagaataaatatcaagtgtgttacttcaagctactttagttatcattaaagtagcttttaacagaaaggtaattgtatgaaaaaaagaatagatttattattagtagaacaagggtactttgaaagtagagaaagagccaaaaaagcaataatggctggattggtttttgttgataatcaaaggtgtgataaggctggtacagaagtaaaagaagattgtagtatagaagtaaaaggaaatccaataccatatgtcagtagaggtggtttaaagcttgaaaaagcaatgaaaaactttgatttgactattgatggaaaggtatgtatggatataggggcatccacaggtggttttacagattgtatgctcaaaaatggagcaataaaagtattttctatagatgttggttatggtcaacttgcatggaaattgagacaagatgatagggttgtgtgtatggaaagaactaatataagaaatgttacaatagaatatacaaagcagtttgctgattttgcgtcaattgatgtgtcttttatatcgttaaagttagtacttccaaaggcaaaggagttagtacgtcatgatggggaagttgtcgctttaattaaacctcaatttgaagcaggaagagaaaaagtaggtaaaaaaggagtagttagagaaaaatctacacatatagaagttataaaaatgatttctgatttctcagtcgaaaatggatttgagattttagggttagatttttctcctattaaaggtcctgaaggtaatatagaatatctaattcatttgagaaatggaaatgaaggatatgaatttgatggtgagacatacaataacaaaatagtagaagttgttgaagcttctcataatttagacaaataggttaaaagggggcttagatttgatcctcgaattatatatgaaaaattgtgccttagttgaagaactaaggttgaatattgataaaaacttaaatatacttacaggtgaaactggttcaggaaaatctataataatagatgcacttggactttgtttaggtgataaatatgataggtcttttttaagaaaaggaacagataagggacttgttgaggctgtatttttttcagacaatagatatcttaaaaaaatattagaagaaaatgatataagtatggaagatgataatttattggtaataactaggttgatatactcagatggtaagagtactgctagagtaaatggaaggactgttaaagtgtctcttcttaaagaaattgcatctacacttatagatatacatggtcaacatcaaaatcaagctttgttcaataaagatactcatttaaaatttctagacctttttggagaaaatgaattggaagagtttaaaattgcttataaaaatgtgtaccataagtatagtgaagtaaaaaaagctttaaattgcttgacagaaaataaagatgagatgcaaattcaacgagaaatagatttattaagatttcaaataaatgaaattgaagctgcaaatctaaataagaatgaatatgaagatttattaaaacaaagagaagtttatagaaatagtgaaaagatatataataatctaaattcgagttatagcaagttacataatggtgagtataatgttattgacctaataggtcttgcatctaaggaacttaatgacatatctaaatatgacagtgttttaagtgaatatagtgatactgtagaaagaattatgtatgagttacaagacatatctggtgagataagaaattacaaagataatatagactttgaaccttatgagctagagcagattgagcttagaatcgacgaaattaataatttaagaagaaaatatggagacagtatagatgatatatttgagtattatggaaaaattaaagatagattagatgaaatattaaatagagatgaaagagttgaacagttaaaaagcaaactgatgaatatagaagaagatttaaaaataaaagccagtaaattgactaaagcaagaatagaagtagcaactactttagaaaaaatacttcttgatgaattaaaaagcttaaatatgaaaaatgtaatgttcaaggttaattttgaaaaaggttcatttactttagatggagtagatgatattgaatttatgatatcttttaacttaggagaagatattaagcctatatataaagttgcatcaggtggtgagatgtccagatttatgttagcgtttaaaaccatattggctgatatagatgatattgatacattagtgtttgatgagatagatactggaataagtgggatagcagcacagatagttggtgagaaattgagtgatatagcaaagaaaaaacagataatatgtataactcatttacctcaaattgctgcaaatgcagacactcattattgtatagagaaagatacttcaaataataggacgtttaccaatgttagtaagttaaatgaatctcaacgaaaaaatgaaattgccagacttatagcaggtaacaatataacagaaaaaactattgaacatgcaagtgaaatcattgaattggctaaaaaatgttagtgaaaaacaagcattttaataggtgtaaagaatttttatagaaatgctttacacctattttttatgatgaaattattttaaaatatctagtgcctatattgaagaaaagtaggtttgaaaatggaatgaactttgtataaatttgtaactttgaaatttctaaatgcttaagtataatattatttattaaggtagtagtgaggggaggcataaaatgaataaaaaagatactatgcacttaatttttataattgtaatttttattttattatggtatattgtggtagcagtaagtgagattaataaaaatattgaaagttgtagtaacaaattagattatttgtcacaagagcttatgagtactaagtcggatattagtaatactataaatgaagaaatgtcaaaaagttatataacaaaaagtattgacttaaaagtaaaaaaaatcgagaaaaaagaatgtactattgatgtagatgttcaattaagtaaacttggaaaaaatggaaaagtattttttatgtataaagaagatagtgataaatggaatgaaactgagatgacaaaacatggggaattatcatatgcatgtgaaataaagataaatacaggaagtgaatatgattataaagtagttacaagtggagatatatctgaaagttctgatgtacaaaaactgactaaatctgattatatgcctgaacaacctatatttaattctgggataagagataatagagaatactttattgaaatagtagaaaatagtaatctttttaatcatgagagtgaaaagtcaaaaaataaagcttacgataatatcaggttagaaaaagtagatattattgtaaatgaaggaaaaaaagacactatatacaaagcccaattagctgaaggcttagatgatggcaaaactaataattcaaatagaaatcaagtgaattatgaagtaagttttcctaaaagggatattgatgacataatttatattaaagctaaacttacatacaataatggagtagaatatacaaaggatataactgaagatataactatgggattacaagatttagaaaaataaatacatatttaaataaatattcaaatagatttgttcacaaatagagtataaataaaactgtagtagttttacttatactctattaaaaaattataattttaattccatatatctagccccttcaattggattataagtataaagttctatatcataaaaaccaaacttttcatataatccttgtgcacttttcatgcttggaagagtatctaatctcatgtgtgtatatccaatttttttagcttctacaatgatttcttccaatagtatttttcctatttttaatcctctaaattgatttcttacatataatctttttaattcacatattttaccttcaagtttttttaaagcaacacaacctgccaaattttcatcaacaaatgccaatatcaatgagcctgaaggttttttatattttcctggaagtgtttttaattcattattaaagtcttgaaaacataagtctatatttagagaatttgaatattcagtaaatagaagttttacgttttcaagattttctaaatctttttcttcaacaaattgtaaagttatattttgagccattttatccgccattatataaacatgtttatataatgacttcacctccttgatatatgtatatttttcttaatatcaattagattttaataccattactttttcaccaccatagtcaagctctccattaaacttaaatccaaaatctttataaagcttaatagccattttattgtcttcgaatatactaagatatagttcatcacagttatattcatttttaagatgatttacaagaaaatctaatgatgcttttccacatcctttaccttgatattttgaatcaatcataaatctatcaagccaaactctatcatcttctaaacgaccatacatagcaaatcctattaaagaattttcatcatatattccaacaggtacccaagctgttataaatttagattcagcaatagaaagtgcattgctttctatgtaatctaactgacttttatctacagacaaactaactaaatcgtgccaattatttatgtctgcaattcttacatttaatttcaagatattaccgtccttcaaactttttgttacaatctaatactatcatattatgtattaaaaatcacttattaagattttaaataaactttttgaatgaataaattctcaggaaaaaggaattataaatacataataatacagcataggagtagatggatatatgaacaaaataaataaaaatttcaaaaatatttggataatattaggagctgtatcgatttttaccatggttataatttttaataaaaattgtaatgttaataaagagactcaaatagaagcttttacaattaagaatcatgataaaaaatttgtatatcctatgggaaatataattggagtaaaagcaaatacagatggtgtattggtcttaggatatgaggaagaggatgtaggctatattggaggcatacaaataggtgataatatagtaaaaatagataataaaaggataaaaaatagtcaagatgtatcagagattttgaataagattaaaaaaagtaaagttgaagtgacttttgagagaaaaaataagtataaaacagaagtaatagagactaaaaaagaaaatggcaagtataaacttggattatgggtaagagataaaatatctggaattggaactatgactttttacgaccctagtatggaaaagttcaaagcaatcggtcatgccataaaagattcggatactaatgaactattaaagataaagcaaggctatatatataagccagaacaattaaaaatagtaaaagctagtaatgaaaaagtaggtaaaataaaaggagattttaatgacagcaatttaatgggtaatttctcaaataattcagagctaggtataagtggtaatattacagaaaaccataataaagagtttaatgtagcaaataaagaaaagcaattaatagaagttggaagaccgcaagatgtaaaaataggagatgcagtaattctttttgaggataaaaacaaaaatataacaagctatgatataaaaatagaaagtatagtatatgataaaggaaattatagagatatggtaataaaagtagtagatgacaagttattggaatacacaggaggtatcgtacaggggatgagtggagctccaataatacaaaataataaaattattggtgcaataactcatgtttttagagataatccgaaaaaaggatatggtatttttatagatgaaatgataaaattgtaggtgaggcattaaaaaattttattattttatcaattatctaggaggaatataattttggagtgtcgaatatgctttagagtagataattaggaagcaattgtgtaaaaagtttagttttctgtaataagaagatgttttttaatggggggatttttagtggaaaaaatcaaaatagttttagcagatgacaataaggatttttgtcaggtattaaaagagtatttgtctaatgaagatgatatcgatatattaggcatagctaaggatggaattgaagcattagacttagtaaaaaagacacaaccggacttattaatactagatgtaataatgccacatctagatggattaggtgtaattgaaaaattgaatactatggatatacctaaaatgccaaaaataatagtactatcagcagtaggtcaagataagataactcaaagcgcaataaatctaggagcagattactacatagtaaagccatttgattttgttgtgtttataaacagaattagagagctagtttctaatagagttacacaagttgagccaaaacctagaccagttcaagagactcaaatgactagaagtgattttgttaagaatgtaggaaatatagagacagaaatcacaaatataatacatgaaataggagtaccagctcatataaaaggatatttatatttaagagaagcaataaaaatggttattgataatgttgagcttttaggtgcagtaacaaaagagttatatccaagtatagctaaaaaattcaatacaacaccaagtagagttgaaagagcaataagacatgcaatagaggttgcatggagtagaggaaaagttgacacaataaatcaattatttggatatacggtacacaatactaaaggaaaaccaactaattcagaatttatagcaatgattgctgataaattaagactagaacatagtatggttaaataaacaagacataaaaagtaaggctttttaattaaggcattggctataaatgcgtattacaagcagcgaaacggtataaccactagggttataccgtttcgctattttaataaatataaaaattttctttattatttgcttactatatcaatataataattttattatactatggatatagtatgtgtctttacaagttgtaaactgacagtggtttattttttaatataaatattgactttgatgcaggtaaactttgtatttttaagcgtattatggaatatgttaaataaaaaaatgatgaaatatagtattgtaaatgccaaagatgcaaaacaaacttaaaacatttattttattgttaagtaatgctataatataatgtgattttaataatgatagtggaggtttaaatatgagagtcgaggcccctataaaagtagatcgaaaaaccaaaaaacttgctaaaagagttgaaagtggggaaatagcagttataaatcatatagacatagatgaagttgctgcaaactctttagtagaagctaaaataaaacttgtcataaatgcggctccttctataagtggtaggtatcccaataaaggtccagggatattaactgaaaataatatactaataattgataatgttggagaagagttatttgaagaattaaaagaaggagaaactatagaagttgtagatggaaagatatatagaaaaggaaaatttttaggtgcaggagaagttttagacaagtatgaggtttcacaccaaataaaggctgcctatgagaatttagctgtagaattggatagatttatagataatactatagattatgctaaaaaagaaaaaggatttatacttggagaagtagaaattccaaaagtgaaaactaattatgctaataaacatgtattgatagttgtaagaggtcaggactacaaagaagatttaagtactatgctttcttatatagaagaggtaaagccagtattggttggtgttgatggaggagcagacgctttaattgagtttggatatactccagatgtgattgtaggtgatatggatagtgtaagtgatgaagctttaaaaaaggctagtgaaatagtagtacatgcttatacagatggaagagcaccaggtcttaagagggttgaggaattaggcttagatgcagttgtatttcctgcgccaggaactagtgaagatatagctatgcttatcgcctatgagtataaggctgagttaatagtagcagttggtacacattcaaatatgattgattttcttgaaaaaggaagaaaaggtatggcaagtacttttttagttagactaaaaataggttcaaagcttatagatgctaaaggcgttaatttgttatacagaagtaaattaaaaataaagtacatatgggcattaatagcaacagcattatttcctgtgttggtagttgcatcattgtcaccaggagttcaacagttcatacaactaatgcaattaaagtttagagtattattacagatgtaaattttaggaggataaatatgcatattaatatgaaatattatatagtcactataggggctatatttatagctttgggtataggcatgttagtaggatttaatttaaataataatcaacaattaagtgaacaacaagcaaacataataaatgatttggatgataagtttaatatcttaaaagaaaaaaatgataaacttgacagtgacttagcaagtgtaaatagagattatgaagaggcagttaattttataaataaaaatgtagataagattttagctggttcgctgaatggtaaaagtataggaataatatcggctaatgaaaatgacgattatacaaaaaatatagaagacataataaataaatctaatggaagtattgcatttaatatagtattaaaagaaaatataacaaatccagaaaagttaaaggaaatgtcaactaaactaggtacagatgtaaaaaatgcaaatgatgcagttaattatataattgacacccttaaaaaggaagatgcaagtgacattttaacatatcttcaagaactagatgtaataaagtttaactctcttggaaatacatatctaaaatatgattctgttgtaatagctggtggaaatgatgcaaaagacagtacaaaacagtttgaaaaaatagaaaaatttgtagtttcaaaacttaaatcagagaataaatatttagtagaagttcaaaatacaggagttaaaacttcttatgtagaactatattctaaaaacaaagttgcaactatagacaatattgatgaaggtataggaagtatatctctagctattcttctacaacaaggtaatatagttggtaattttggtagattggatactgcaacttcattgttgccatctattaaatagaaataattttaaggagagaaaaaatggattcttatataagtataataataccagcttataatgaagaaagtagaataaaatatacattagaaagcatattggacattaagcaaataaatgaaataatagttgtggatgatggttcaattgacaatactgctaaggttgtatctgagctagaaaatgaaaagattaaattttttaagttagataaaaatagaggtaaaggatatgctttaaattatggtatcaaattagcaatgaaaaatgcagatattataggttttctggatggagatttaggaagctctgctaaagaagttgaaaaattaatagtacctatattaaatggtgaggcggatgttacaatagccaagtttcctcctgcaaagagaaaaggaggtttgggatttgtaaaaggtttagctaaaaattctgtgtttgagatgactggtgttgagttagatgcaactttatcaggtcaaagaatatttaaaagagaagttttagaaaagtttgatgaaataccttttggatatggagtagaagttggaatgaccattgatatattaaagtatggatttaaaattaaagaagtattagtaaatatgactcataatgaaacaggaagaaatttaaaaggttttattcatagagggaaacagtattatcacataaaaaaggttttaggacaaaaaaagaaagaatggaggtaatatcttagtgaaagattatatactttataccattttattattaactggattatttggaacctatgctgtaattccactatttaaaaatttattgataaatggaaatgtacttagaccaaactataaaaaagatatgataccagtaagtatgggaattgtatttttgcctatgattgtaatcaatggaataatacttgctttctttactacagaatttaaggatttagcgtatatatttatgtttatgtttggtatgatatccatgttttttgcagggatactagatgatgtcattggaaatagagatgtaagtggtttaaaggggcattttaaaagtttatttaaaggaagtcttacaacaggaggttttaaagctttatttggtggatttgtagggcttatagtttctgttgctatatcaaaagacataattgatataatagtaaatacactaataatagctctatcaactaatttaatgaatcttttggatttaagaccaggaagggcaataaaagcatatttattcataatggtaattatatttttaacattgacaggatttgttcaagttcttccattacttatagtaccaaatgtacttgcatactttaattatgatttaaaagcaagggctatgatgggagatactggttcaaacgtccttggaatatctattggaatgctcatttcttttgggtatccatttaacattagattaggatggttaatatttgtagttattatgcatatattcactgagaaatactcattaactaagataatagaaaaaaataaactattaaattttatagataaattgggaaggtagtattatgataagcaaaagagtggggattgttgaatcaatagtaagtcaaactgaaactctagatgatataagagtaaatataaatggaaaaatacaaagggcatataattatcccaaaatatctggaactataaatataggtgatgaagtggttttaaatacaacagcagtagaactgagcttaggtacaggtggataccattttgtaataactaatttaaataatatagaatctactttaactgaaggtgggcatataatgaaacttagatatacacctcttcaaataaaagtggattctgttgaggaacaagaaagtatttatcatgataaatttgcgaattttaaaggattagaaggtctttctgttgtagtagggactcttcatagtatgttaactccatttgcagcttcatttaaaagaaataatccaaataaaaaattagtatatataatgactgatggagcatctcttccaatttatttaagtaaaaatgtggacactttaaaagaaaaaaaattaatagatagtacgataactataggaaatgcgtttggtggagattatgaatgtataaatatatatactgcattaattacagcaaaagaaatactaaaagcggatgcagtatttgtcagtatgggacctggaattgctgggacaggaacaaaatatggatttacagggattgaacaaggctctattcttgatgccgtaaaaaaacttgaaggaagagcaattgcaattccaagaattagttttgctgacaaacgagaaagacatcaaggtatttcacatcatagtatgactgtatttaaagaaattgtaaatgtaaatgtagacataccaataactatatatgatgatgaaaaattgaactttataaaagagcaaatcaatttaaatggtttagacaaaaagcataatataatttatatagataataataaaacgaaagaggatttagactattttaatctaaaagtaaagagtatgggaagaaattatgaacaagatgaggcatttttcaaagctgcaagcacagcagcatattacttaatggaggtttaagatggtattagaagaaaaaactattagtagtgatagggtttatacaggtaaagtaattactttaaaggttgatactgttgaaattccagggcaaggatatcaaaaaagggagttagtagaagttggtggagcagtaggaatagttgcaatcacagatgataataaagttgtactagttaagcaatttagaaaacctatagaaaagccaatctttgaaattccagctggtaaactagaaaaaaatgaaagtccaaaagaatgtgctgaaagagaattaaaagaagaaactgggtatagtgcaaaaaatattaagctaatacataaatttttcacttcagcaggtttttctaatgagataatgtttgtatatttagcaacaggtcttactccaggagagaataatttagatgcagatgagtttttagatgtctatgaaattgagcttgaagaagcatataacatggtattaaaaaatgacgttgaagatgcaaaaacatctattggattattattagtaaaagatatgtttaaaaattaatatttataaaatgaataaccctttgtcctaaagcatattattttataaaggacaagggggaattaaattgagaagaacatatagaaaaaatgattttagagaattaaatagacaaataattattataggattgttgtttatgatgtctattgttgttgggtcttacataaataaaatattgccaggttctagtaacaatatattaaacaatataaatcctgctgtagagtattataatctaaatataagcataaaagatacagtgatacaaaatttaaaatcagatgcaatctttatgggctcaatagctctattaagtctatttgtagtaacaattccagcagtgttggtagcttttgtattaaaagggatgtcaattggttatacaataaatagttgtatattggcattaaaatttaaaagtataaaaatgattttaataatattatttaaaaatttgattattattccatgtgcaatcatattagcattaattagtttaagttattttaaagaaatggtttatgaatttaaaaagaaaaatagaaaaaatatgcaatttttaattaagaggtatatactaaatattataattataatagcactatcattggggttgcaattaatattaaatactgtaagtattggtattattaagttcctagctaaataaaggagtttataatggatattatagagggatatatagattacataaaagataaaaaaaaattatcagagaacacagtggcatcatactttatggatataaaaaaatatatggaatatataaatcaaaaaagcattaaactagtagatatagtagaaaatgatattataagttacttaataaagttggaaaaagataatgtatcaatagctacaatagcgaggatgatatcctctataaaatcttttcatgattatttatttttaaatcatatatgtacaaataatcctgcaaaggatataaaaaaacctaaaataaaaaaagaaaatataaatatacttacagaagaagaaattgaaagactattaaattttccaaagttaacaacacctaaattgattagggacaaggctatttttgaagtattatatggtactggtataaaagtatctgaattagtagagatgaatatagaggatattgacctagatattgattatatatattgtaattcatgttgtaaaaatcaaagagtgataccactttgtgatattacaaaactttacttagaaaagtatctaaaagaagcaagacctaaaatggctgtagaaggtgaaaaatcattattcgtaagttcattaggtcaaaggtttacacgacaaggtctttggaaagtcataaaaaaatattctaatctagccaatatagataaaaatataaatcctacaatgcttagacattcatttgctattcatttgttaaatgaaggtgctaacattgctgttgtaagtaaaattttaggaaatgttaatttatctagtttgcaagtatatttaaatcatatagataaaaacgtgagaagagaaataaaggaaaaacatcctagaaatgatgttgatgtagaattacaaaaagcagaagctaaatagactatatagcaaattttataatttaaaaggagtatatttatatgagcagagtaatttggattgtaattgatagtgttgggataggagcattacctgatgctgaaaaatttggtgatagtaaggatgtaagtacccttggaaatatatttaaggaatatccagatattcagattcctaatatgagaaatttaggtataggaaacatagatggtatagatttttttgaaagtataaaagaaccaataggttgttttggaaagtgtaaggaaatgtctcagggaaaagatactactacaggtcattgggaaatgactggtataatagttgacaaaccatttaagacatttgaacatggattctctaaggagataatagaagagtttgagaaaaaaactggaagaaaagtagtaggaaataaaccagcttcaggaactgtaataatagatgagtatggagagcatcaaataaaaactggagatgtaatagtatatacatcagctgatagtgtatttcagattgctgctaatgaagaagtaattcccctagaagaactctataatatgtgcaaaatcgctagggaaataatgatgggggataatgcagtagctagagtaattgctagaccattcataggtaagaaaaaaggtgagtttgtgaggacttcaaatagaagagattattcactagacccatttgaaccaacagttcttgataatataaaagaatcaggacttgatgttttagcagttggaaaaatagaagatatttttaatggaaaaggaattacagatgctatccacactaaaagcaatatggatggagtggatgaaactttaaattatatgaaacaagataataaaggtctaatatattcaaatctcgttgattttgattctaaatatggtcatagaagagacccagaaggatataagaaagctcttgaagagtttgatagtagacttcctgaaataatggctaatatgagagaagatgatattttaataatcaatgcagaccatggaaatgacccaacatataaaggtacagaccatacaagagaatatatacctgttatgatttatggcaataagattaaaaaaggttttaatttaggagtaaaagatacttttgctgatattggagcaactgttgcagatatactaaatgtaaagttgcctaaacatgggtcaagctttaaagaagatttattttaaactataaaatgataaaaacttagcttaataggatggagagattggaatgtttgaaaagatagcacaaagtagtaaatttataaattctaaaagtaatataaaacctaagattggtttgatattaggttctggactaggtgatttagcaaatgatatagaagaccctgtcacaattaaatatagtgaaattccaaacttccctgtatcaacagtagcaggacatgctggacaacttgtaattggaaaacttgaaggaaaagaagttattgctatgcaaggtagatttcattactatgaaggatattctcagaaagaagctacttttccagtaagggttatgaaagaattaggagtcgagattcttatagtaactaacgctgctggaggcgtaaataaagaatttaaagcaggagatttgatgcttataagagaccatataaactttagtggaagtaatccattagtaggaaaaaatgatgacagatttggtgctagatttccagatatgtcagatgcatattcttctaaatatgtagatgtagttaaaaactgcgctaaagaatgtaatatagatgtcaaagaaggcgtttatatgttttttagtggtccaaactatgaaacaccagcagaagtgagaatggcacaaattttgggagctgatgctgtaggtatgtctactgttccagaagtcatagtagcttctcactccaatataggagttattggtatatcttgtataacaaatatggctgctggcatcttaaatcaaccactaagtcatgaggaagtaatagaaactactcaaaaagttaaatcagaatttatgaatttagttaaaacaacggttaaaaatttataagttaaagcttattatatattttttgaggaagtttataataaaatagttaatgtttaatttgaaaagaattaataaaaagctgtcttgatatagaaagttatttctaataaaggacagtttttttataatactacaacatttgaaagtgttttaaagtttaatatttatttaaattattatagattagaatggagatttcaattatgagaatgtatgatattataaaaaaaaagagagataacttagagcttagtaaaaaagagataaactactttatagaaaactattcaaagggagatatacctgactatcaagcttctgcactattaatgtcgatttatttaaataagatgaataaacaggaaactgtacatcttacagaagcaatgatgaactctggagacatgataaacctgtctgaggtagatggaataaaggtagataagcatagtactggtggtgttggagataagactaccatagctcttatacctttggttgcttcatgtggagcaccagttgcaaagatgtcaggtagaggtcttggtcatactggtggtactattgataaattggagtctataccaggtttttcgacagaaatggagataagtaaatttattgattctgtaaataagtctaaaatagcagtttgtggtcaaagtgcaaaggtagcaattgcagataagaaaatatatgctcttagagatgttacagcaactgttgataatatatcattgatatcatcaagtgtaatgtctaaaaagttagcttcaggagctgatgcaattgtgttagatgtaaaaactggtgatggagcatttatgaagacattagaagagtcttttgagttagctaaatctatggttgatataggtactggtatgaatagagatacaatagggattgtaacagatatggatgaacctttaggttttgcagtgggaaactctttagaagttatagaagcaattgagacattaaaaggaaatggccctaaagaccttgttgagctatgtgaagtattaggagcatatatgttggttttatcaaaggtagcacatgattttgaagatggtgttgaaaagataagagaatcaataaaatctggtactgctatacaaaaactcaaagagtttatagagaatcaaggtggtaataaagatgtagtagatgattattctttattcaaaaaatcaaagtataaatatccagttaaatcaattaaatcaggttatataagtaaaattaaagctgaagatgttggtgtatcagctatgattcttggagcaggtagagaaactaaagatgatattttagatttatcagcagggataattttagaaaagaaagtaggagattatgtaaatgaaggtgaagttttagcttacatgtattataatgatgaacaaaagctttcattggcaaagggaagatttattgattcctactctattgtagattcaaaaatagaaaaaaataaattaatatatggtattgtaactaaagaagagattaaaaagttttagaaaattttagaaaagtgattataaaaggcctaacatgtcaaaaataatgttaggttttttattttttgataaactataaattataccaaaaatatatattttaaaacattttttacaatataaataagtttattctacaagatgattgaaaattaaagtatctagttttataatagaaaatggataaatatacataaggagtagattatattatgaactttaaagaaaatagattgaaaatagcagtattaataattgttattttgattatcttagcaggtatatttgtgtttatacaaataggtccttatgataaaaataacaaaaaagatgtaattattgacgttccaagtggagcatctgttggaaaaatatctgacatattatatgaaaataaattaataaagaatgaactattatttaaacttttggtaaaggttagcaataaagctccgtctataaaatcaggaacatacttacttaatcaatcgtattcaaacaatgatataataagtcttttagtttcaggtaaaatatatcaggatggtataaaagtgactattccagagggagctacatctaaagaaattatagcaatgttagtaagtaaaaatttaggagataaagctacttttgaaaatttaataaaaaaacctcaagaattttatgataaatttccatatttgaaggaagatggaataacctctttagaagggttcttgtatccagaaacttattattttaattcaaagaaacaatcagaagaagatattttaagcgaaatgttaaaagtatttgacagtaaatacacggacaagtttaaaaagaaacaaaaagaattaaatatgactcttcaagaagtaatggaaatggcatcaataattgagaaagaagctgttcttgacaaagacagacctataatagcaagtgtgttttataatagacttaaggtaggtatgcctcttcaatcagatgctacaatacaatatatatttgaagagagaaagaaaattgtaacatatgatgatttaaaaattgattcaccatataatagttataaaaataagggattacctcctacaccaatatcaaatcctggtataaaatctattgaagcagcattatatccagagaaaacagactatttatattttgtagctaagattgatggtggaaataattatagtacaaactatcaagaccatttaaaatacgttaaagaatataaagaagcaagggataaacaatcaaaagatacaaaagcaacaaataaagaaaatacaaaaaaataaaccatgattataaaaagtctaacagggtaagaataatgttgggcttttttattgaaaattgttattcttagatttataataaagaaagtgtaaatatatataacaatatgaatttaaaaaataataaattaatataaaacttgaatatttattattttagggagtgtttttatgagtaatatagttaatgatttggttgaagattatataagagtgacattaaaagaaaaagaaggatttttaaaagatttagaaatttatgcagaggaaaatagtgttcctataatacataaagaagtttcagatttattaaaagtcttgttaaaggttcaaaaaccaaagagaattttagaagtaggatgtgcaattggttattcttctattttttttgcaagtattataggaaaagatgcagatataataactgttgagagaaatgaaaaaatgatagaaaaagcaaaagaaaacataaaattagctggatttgacaataacataactatactagaaggagatgcagaagaaaaacttagtcaagtccaaggtgaatttgaccttatatttatagatgcagccaaaggtcaatataagctattttttgatttagttatagataaattaaaagatgggggacttttagtatctgataatattttgtataaaggtatggttgctcatgatgattttgttgtaagaagaaaaaagactatagttaaaagaatgagaaattatttagattatatatgtaattgtgactatttaagcacatcattggtaccaataggtgatggtgtagcactaagttataaagaaagtaaaagaggtgatgtagatggaattaaataaagtagaacttttagctccagcaggtgatttggagagattgaaaatagctataacatatggagcagatgccgtttatataggtggagaaatttttggaatgaggtctgcagcgaagaattttagtaaggaagatatggcagagggagtagcttttgcacatgaaagaggcaagaaagtattcgtaacagtaaatataatacctcataatgaagattttctacaattagaagactatttgttggaactagaagagataggaatagatgcagttataatagctgacccaggagtgcttagtgtcattaaaaaagtaattccgaatatggaaatacatttaagtacacaagcaaatacaaccaattatctaagtgcaaacttctggtacgagcatggaataaaaagagttgtagtggcaagagaattatcttttgatgaaatatctgagataagagcaaaaacacctttagatatggatatagaagcgtttatgcatggtgctatgtgtatttcttattctggtagatgtttaataagcaactatatgactggaagagatgcaaacaaaggttcttgtgctcaatcttgtagatggcaatatcatttggtggaagaaaaaagacctggtgagtattttccaatatacgaagatgaaaggggtacattcttctttaactcaaaagatttatgtatgatagagtatataccagagttaatcaaatctggtataacaagtttaaaaatagaaggtagaatgaagactgcatactatgtagctactgttgtaagagcatacagaatggcaatagatgaattttacagagccccagaaaactggaagttcaatccaatgtggatggaagaactaaaaaaaggtagtcatagacattttacatcaggtttttacttgaataaaccaacaacagaagaccaaaattatcaatcagcatcatatgttagaaactatgattttataggtatagttagagaaacagaagatgaagatggtcttattgttgttgagcaaagaaataaaatgtgtgttggtgatgaaatagaagttatgggaccatataaagaaactatgtttactaaaattgaagaaatgtacaatgaagaaggagaagctatagaatcagctcctcatcctagacaaatagtgaagttaaagctatcagtaaaagttggtaaagattatatgcttagaaaagttatagaagaaaaggttgaagaataataaaaaattgataaaaatagtattagccccttagaaattgtcaataatgaaattatctaaggggtgatttcatgtcaaaaaagaagactccatttttgaaaaaagtgggaaagagaagctggtgtatatttactataattttaataatttatagtgttttaatttataggctagttgatatacaagtattaaaaggtgataaatacaaacaaagtgttgaatcacaaagcgttgagaaagtcgagttaaatagtggaagaggaataatctatgatagaaacaacaagaagcttacagatacaagtaaatctcaggtattaattgttgaaaaagaaaaattaaataataactataaaattttggaacttattaagaaagctactaagatgaatgatttagatatatataaagctgtacaagagcaattgacacgccctataatacagattcagactaaaaatatcgataagagtatgaaaaaagaacttgagaaaaatggaataatggtagaagaaaaaactatgaggtacgcaaaagatggtttattatcacatacaataggatatataaaagaagatgataaatcaggtcaatcaggaattgaaaagagtatggatagtgtacttagaaattcaaatgaaaagtatataagtgcttttaaagctggagatgcaggaaatgaaaaatctctaaacatactaaagggaagtgtaaaaactgttgataataaggataaagatagacatctaaaaactactattgattataacattcaaaaaaaattagaacaaatactaaataaagaagaaaatcctacagcagcaataatctcggaagcatctacaggtgaaattcttgcaatgtgctctagacctaattttgaccaaaatgacatatcaaaaagtttaaaaggaaaaaatggggaatttgaaaatagagttataaaagcgacatatccaccagggtctgtatttaagatggtagttttattttctgcacttgaaaatggtgttatagatgagaactatacttacaactgtacaggtaagactaaagttgggaatactaatgaaatactgcgatgtaataaaagagatggtcatggtttccaaaacttaagacaagctttttctaattcatgcaatcctgcatttttagatatagctatgaaacttggaaaagaaaagatactcaaatctgctgaaaaattacatttatttgaaaaggttgatattggtcttgatgaagaaaaaattagagaagctccaaaaaacatatcaataagaaatttagctataggtcaagaaaatatagaatttacaccacttcaaataaatcaaatgactcaaataatagctaataatggaacattcaaaccactatacttatataaaagtcttgtggacaataatatgaatacaataaaaacttataagtcttcaaaaaaagaagaacttatttctccttatgtgtgtacacaagttaaagaatatatgaagtctgtatctaggattggtacagctaaagacctaaaagatattgaaggtggttgtggagttaaaactggtacagctcaaagtagtttaaataaaaaagctatagaccacggatggataacaggattttatcctgaagaaagacctaagtatgtaataactgtgttagtagaaggaactcaaaaaggaaataaatctgcaacacctatatttaaggaaatatgtgaaagtataaaataaattatgtactataaaatttaaggatatatcgtaactttgattttagatagaaaactttgtctaatgatgtacgatatatccttttaaaatatagtattaactttcttgaacaagctctttttctagttttttaagagcttttttttcgattctagatacatatgaccttgatatatcgagtttttgtgcaatttctctttgtgtcttatagccataaggagttaacccatatcttaactggacaatttctctttctctaggagtaagaattttgtttagttgttcgtaaagttttccaacttgaacttttagttcaacttcatcaagaacatagttagcctctgtgccaagtatatctaaaagacttatttcattacacactactctttatatgttattggtattactggtcttcatgtaatttcaaatgaaccattaattcaaaagaatctagtttttgttctttagacttataataaattgctttatcaattacagattttaggagtttattttttccaagggaatctgaatcatgataaagtgataacacagttttaatatcttctattattttagaattgtcttttttaacagtactcaatctattttttactgtcttaattgaatctttaatttcttcagttcttgaacttatattgttggacctttcaataaatgtatcttcatcatatattccacgttctaataaatcatataacttatttttttgtttacctaattcttttaattcagtttctaagccctttaagactcgtttttgaaattctatattactatctttattatttttatctaagtctaaatcacatgcttttaattgatatttttttaccgtgtcttccaaagattttaaaatggcagcttcaataaattcaaatcgagaacttttattgcaaccaggatggtaacaaattatatagtcgtggtctgcatatggtctatatactaatggtctaccacaatttttgcaaatcactattcctgcaagtggattttttatttgattaccatagctgacatgaccgttttttttaagtatattttgagcttttttccatgttatttcacttattaaaggttcatgctttccttttgcttcaatccattcatctttaggtcttagcttaacagtttttattttatttggatttttagattttttatagtcctttttttgccactgaatgtagccacaatataccttattttttattatatttgtaattgcagaattgtaccaattagcacctgtagcagttttaatgcctaagttatttaggtattttgatattttactacaacccatatcttcattaatatataagtcaaagatagtcctaactacatcagcatccttatttggtacaagtattctttcttttctacctgttgttacagcatcatatccaaatggagcagaagttcctatgaaattcccttcttcaactgattttattctacctctttgcattcttcttgatataagttttaattcttttcttgccataaatgcttcaaattctgaatactcctcatcaaattcatctgttaggtcgtatgtttttctaggtgtgatgattttggttttactttctttgaatgtttctaatatgataccttggtctttcatgtctccacgaccaagtctgtctaagtccattactaagactgcatcatatttattttcttcaacttcttttagaagttcaagcattttgggtctatgtattatactttcaccagaaactaattcttcttttatctcaattacatctaagttttgttcttttgctagttttagtagggttgatttatgtctacttaaagtttcaaattcgccttgtttttctgcctcttcatcagcacgggattttcttaagtatatggcaacactcataataagtaatcacactccttatgcactattatatagtaaatcaatagagtttaaaatatagaaaataagcatgtcaaaagttaatttaactttcaacatacttattttctataatattaatgccttataatcctttaatatcatttagattagtttttgcatattcattatccgggttaagttcaagcgccttattgtaagattctctagctttattaaattctgatttactcataaaaataacacctcttaaattgtaagcatcactagcgtctattttataagcttcattatttttatctagatattctaaggatttatcaattgactttaaagcctcatcatatcgttgtaactctatataaatatatgattgtgtataatatgcaagtggatttttatcatcaatttctatagcttttttgatatcaatagcagctttattataatccttatcttcatctttttttgtttctgacctagcgattttgacataattagagctaagagctcttttaaagtctttatgccataataatttatattcattatcttcgattataaaatatctatcaaaatttgcagtatcttctttattttcagtgatatactttatagtatcagtttcttttattttaacaagatttgtgtactctttattagaatatttgtatttctctactttattttcttcaccaagtttataatcttttagggtttgaagtttaaataaagtatcttgatattcttcaaatttttctagactgacactttccttactgtctttacttaataaattatatgctacttcgtagtctttgatttctatactatcaaggtactttttagctacttctgtagcactttcttttggagcacatccaaccattgatatcataattaaaaatgatactaatattgctgttatttttttactgattatcataatataatcccccttatattgtctctcactaattttattttatcaccatattctaccaaagtcattaatttaagaatgatatttttcattaatattatattaagtaataataatttttaaaatttatggtaacattttcctgaaaagtattatataatttaggtgaaaatatttaagagaaggagatattatgaaaattaaaaaattattaacaatagggttatctttatctatatttattgctagttgccctatatctgcaaatgctcttgataaaattgaatcaattaaaggtgcagataaatacgaaactgctggtataattgcagacaaacaaaactatactacagctatattaattaatgcagacagtacaatggctgatggattaagtgcaagtggacttgcaggagctataaacgctccaattcttttgactaagaaaaataacataccaaatgctacacttaaaagattagaaaaggcaaaaaaagtatatataattggaggagaaaactctattaataaatatactgaaactgttctaaaaggcaaaggaatagagattaaaagacttcaaggtagtgatagaattaagacaagctataatgttgcaaaagaaataaattcaattaacaaagtaaataaagtcatattgactaatgcttttaaaggagagcctgatgcaatgagtgctgcacctgtagcagttagagataaagcagctatagtattaactgatggaaaaagtgttccatttaatacaactggtgtagaaagttatgtaataggtggtacttcatcaatgaatgacaaactagttaaggatactaattcaactagattaggtgggacagatagatatgatactaacaaaaagataataaataaattttatagtggagtaaaagaattttatatagcaagtggtactgatttagtgtatgctcttgttggttctaccattgctaaaaataatgctattgtgttagttggtaatgatagtaataaaagtgtattgaaaagtacaattaaattaactgctataggaaatttgagtgatagtatattacagcagtgtttaaatgtaacaaaaaatataggcgattctaatactggaagagaatatacagtagaagatgctgctaatgcagtgaaaaaactattaggtgtgaagaaattttattacgaacctaattattcagaagatgaagatttaatatttctactagataaaaattttgatttttcaggaaaagagtactatgtatttgcttacattaaacagggtgcagagggtgatgttagatactgtgtagctaaaaatgatatgagcaaagtttatacatatgatgttaatggtaatatgaaagtatgtaatccagatgattataaaaataaaggaagtataacagaggaacaagcaaaacagatagcattaaaagaatgtgctaagagacataaagtcagtatcaataacttagtagttgatatgatagattttagagatgatatatatagtggtaatgtctatgctgttaaaatcaattcaaaaaatagtaatggtacttttggttggttttttatagatatagaaactgggaaaatttataattaaaattagaacttttaaacaataattatataatttaccataatatgttataatatttttagcaagaagatttaacttacaatctatagagtggagttcatgtacaaaagattatcctcccaacgattcgaagggaggtgagttcatggataactttttgtttaatgttttagctagtttaacagctagtgtggtagtttacttaatcagtaaactattcaaaaaagcaaaaagccactctcgcatgaactatacccctcttaggagacagttgaaatatgtaaaactgtctaaaactaggagggttttgttatgtctaaaactaaagtatcatcagagcaaaaaatcgaagcaattgaatcatatttaaagggtgaaaattcagtaataaaaataatggaagaattaaatattggaaaacgtacattcagagagtggatgcgaaattatgaaacttttggaaatgatggtttaataaaacaaagtcacaaatcatgctattctaaagagtttaaattaaatgctatagaatcttatctaaatggggaaggatcttatgatactatctcaaaaaaatataaaatgagatcagttcatccactaaaagcttgggttaaagagtataatcttcataaggtgataaaagaaaccccgaagggaggactctttatggagactagaaaaacaacattagatgaaagagctgaaattgttaaagattgtattgaacatgatcttaattacaatttaatagcaaaaaaatactttgtttcatacagccaagttagaagatggactcttaaatataaagaaaatgggatagatgctttagaagaccgaagaggtaaagcaaaaaaagaagatgagttaactcaattagatgaaataaagttggaattgaaaattgtaaaagcagaaaaacacaaattacaactggagaatgaattcttaaaaaagttaaaaatcatagaaagagggtggtaattacactatccaagaatgaagataaatataaagcgattcaatccttattcaatgaaaaaaaagcttcgcttatacaattatgtgaaatcgctaaagtaaatcgttctggatactataaatggctcaatcgagataaaagtaatttagaacttgaaaacattaaattagcaactttgataactaagatatatgaagaaaagaagggagtttttggctctttaaggatgaccttgcagttaaacagagagtataaacttaatgtcaatcacaagagagtgtacagactaatgagagccgtaggcttaaggtctatttgtagaaaaaagaaatttagttatgttaaatgtacaccagaagtaattgctgaaaatgtattaaatagaaaatttagtgcagataaaacttctcaaaaatggttaacagatgtaactgaatttaaattaaccaacgggacaaaggcttatttaagtgcaattctggatttaggtgatagaagcatagtttcatatgttattggaaaatcaaataacaataacttagtattcgaaacttttaataaagcaatagaagtatatccaaatgcaaaacctatctttcatagtgatagaggctatcagtatactagcagggtgtttaaatcaaaacttttaacacaaggcatgatacaaagtatgtcgagagttggtcattgtattgacaatgctcctatggaaggattttggggaattttaaaagtggaaatgtactatttaaggaaatttgatacatacgaacaattagtcaaagcaatagatgattatatatattactataataattttagatatcaaaagagattaaattctatgtctccacttgaatttaggaaatatttaagtacagagatagcataatttattttaagtagctctaaaaaaatttaaatatctagggttttatttgatgtgctattttttagatagtaaactttaaaatatagctattaattatatgaatataataaaaaaagtactaatgattgacactagtactttataaccacttttacatgttttaactgtataaaacagtgggtatagttcagcacaaagagtgacttacgagttgaatttaaatttatatttaaatccaaaaaataaactctgtttatgatgaactccactctaacgcaaaatagattgtagttcttcttgcttttattataccacaaaacattataaataaaactgttgtttataaaaaaatgcaaagtaaaattttttataaacaatgataaaaattttattatagagctattaacttatgaaatatctgtaaatgagtagatatttcataagttaatatttattgtttgtataaaatatttggtaaaaataagtaagttttatatgttataataattgtagcaagaataataatcgaaagcagcaagcatgtcagctggtgttatatcagtttatatttatgataaaataaaaatctcccaaacgccaataaggatgatttaaaaaaataatattttcacttaaaaataatcactctttataggagtaaattattttcttgattttattatactacaaattggtacagatatttaaaaataatatattcataatattataaaattataaatagttttgcagtgagcgatatttttgataaaatagggcctaacagttgaaatataaggcattgagggtatgtgataaatgttatcatttgcactactcatggttcactgcaaatttgagagaattgtatagatgtaagtgttggaaatactcaatttattttggggttttatattaactaagtggtatgtaaagtctccatctccaattaacataaataattcatccgctggttttatattaactaagtggtatgtaaagccgcttggcaaatcataagaaggattattttctccaacgttttatattaactaagtggtatgtaaagaaaataaaagagtttgaattacccattttttcatggttttatattaactaagtggtatgtaaagtacgacattgaataaaatgggtacagagacaatttataagttttatattaactaagtggtatgtaaagtttataaatcttttaatgactgtctctgatggtacaggttttatattaactaagtggtatgtaaagaaaggaatagatgatatgattgctaatgctgaacaacaagttttatattaactaagtggtatgtaaaggggtctgactttaatatatatatatatatatataaattgttttatattaactaagtggtatgtaaagttataaactcccacgacaaaattaactataacctcgtgttttatattaactaagtggtatgtaaagagttttaaagagggcagacctaaaaaatatactaaaagttttatattaactaagtggtatgtaaaggcagaagatttagcgactgttgttgctgaatgggatggttttatattaactaagtggtatgtaaagattaaattgctcagtctagtacttaaagaattataaggttttatattaactaagtggtatgtaaagttgctatgatttaattatacgacgttttgtctttaaaggttttatattaactaagtggtatgtaaagtgctgtgccacaatttgatgcttctatagctaaattcgttttatattaactaagtggtatgtaaagcttttaagtgcatcaaaggagttacaagctatatttagttttatattaactaagtggtatgtaaagacagatctaatatcaaaataaggttatgacttttaaaagcatagccatatcagtaaaaatttaattatcatttaaaaaataaatttttatttaaagaatacacataaatatttccagacttaactctcttaaaccattttcatatcctttagtagatacttttgttattttttaatctttagtaacttattcttgagtgaatctcttattttttctaagctatttcaagcttctcaaaaaattctatatttatattcatcacacatataatacaatcaattcagttttaattgccaatatttagtttttctgtatctgataaaccaagaacataatcagtatataaaccaaaaattttagcaaatattattaacccatcgtctcttgttggtctttcaccagattctattcataacacttgtatttatatttgttttttcaagcaattctttttgagaactattcatattttccctagtatatttaattctttgatttacatctatacataattacctcgaaaaatttctgttttggaaatattgttattgaaatatagcaattaaggtgaatatatgaaaaagatacactatgattttataaaaaagaagacatacataaaatttatacttacaaagtgttgcaaaagagttaggttttaaaaatgcatcaacttattttaagtacaggaaggggtaatattcaattagagttgatatgttacctataaactatctaagatacttgattatgatatagaaaatttttttacaaattaaatttctaagatagaaatttaattaagaggatgatgaggatgaataatttacaagtaatataaagaaataataagagaattttaaatgcatagcaactagcagatatatatgaaaatgatgtaaacaatatataaactaacttcaatagaaataaagagaatgtaaattatgttttattacaattcgagtatttgaaagaatttaagaactaacctactaatagtcagttgatttcaaaacattctagtcaattatacctttggatcgaaagatgtgcaaatagacactgcaaaatattagatattgataaaacttgggaacaatttgacaatttagagaaaatatatttcaagattaagcgagagaaactaagctgtatagaagatgtattaatagaaaatttaagatttaaggatacaaattaataaagcaataatatggcattagatgtaaaaatagaagttaaaataataaaagatgttgttatattaaatataatacattggaaaaaagaaacaagtctattaacagttaaaattgctagaggtcaaggtgatttaagttatgtaaaatattttactaatgagagctaagagcttcttaacaagagttttggtgtgtctcttgaaacaatgttaacaattaataaaagacgaatggcagaagaaggcgtatgtaagtttaaaagagataagttaaacaaactagatactatataagaggataagaaacttatagaagaatatgttacttttgtaaaggatttagctttaaaatatagaatataaagtgattttaagtaaaaattgtaacaattaaataagtataagacaagtttatgagttcatattttataacaaggggtgatgttatgaaaatactacaacaatttaaaccatacaaatatgataaagaaaaaaatatagaatatgatgaaaaaattatagctaatcaaaacacagaagtttatatagtatatccacgtatatctgatgaagaaaataggagaagatgggaagagttcaatgaagtagctaaagaagtagctattaatatagctatgaagaaagttgagacagtagaaagttaagagaatagagaagttgctaatacttagcactttctcatagaagaaaattggacaactatttttaaataattaggaataaaaaagttaaatcatatttgaaaaaaggcgataaaattgttgagtattgttattagtaataagaatgtattaaaagaaattataagtttttagtaaatatagtatttaaggatattaaaactggtaaaaaatatcatttagactattaaataaaaaagtgctggtcaaagtaagcaacacaataaataaaaaaacttatagaaattataagataaaaagatgagatttgaaatggttgaagttaatataaaaattaaaggtgaagtaagtgaaataattgactcaattagaggtatatttaatagctttgatgaagagttaatattagatataaaatcagagtaagaatataaaggtagatacgtagaaagttataagtaattcaagacttaaattaatttctagtttttttaatgcaaaaatttaataaatttcaaaatataataattctgacatctaaaaagagctattaaaaatgaataatattgactattaagatatgaatagtgtacatatattaaattaagatatcaagtaggttaattttatataatgatggggctcaaattgaagaggcgatataaaaatgtattaatatatataaatataagaactataatacatattaactgtaaaattaaatttatagagttatatttaacatttaatgaactgaaaaataaattagcaaataatgaaaaaacaacagtaataaatgagaataacaaagcattctcaggattagtggatttttctaattgagctttaatcctagtttgttcaatttcgatatttctaatattattagtattatcaatttatttgtaataattatcaatttttgcgaaatatttttgataatttatagaactttatatattttccttaaagtatttttagcccttattgtttggtttccaattttaaaactcataaactcccaataaattcatgtataatataccttaatttataatatatttaagagtttatttcagtaatttttcgaacgattttgatatatttcatttatagttttcaaaaacttatacaaaaaagagtgtttcatttttctaaacactctttttataagaatttgaataataattttttaaaaattgataatatggttatttctttttcaagtttatagtttcctcatttccattccaagatataattagcttgtaactagattctctatttgaataaagacctggtctttgtatttttattgctttttcttgacctgcttctaaaatttcattttttacaactacaactgcatcttcaccatctataaattgataggaataattaaatttttgttcaactacatctttactatttttatattttatttctaattttgagtgtccttcagtagttacaaatttagctttccaattttctgattctccaataaagacatttttatcattttttatattaagtatagctatcacagagattattaaaactataagaatacctataaaaaattttttcctcatatcaatccctcctttgaataattataacatgagaatagttattcaatactaattttaaaaatattgtggatttatattctattacaatagaatgtctgttataacaaataaaaagtaaggattaatatgaattataggttaaaaaaatctgtaacaactattttatctttactcataatgacaatactattaccaacaaatgcaagtgctagtaaggtagaagattcatctatgaaagtaatgtattcagagaaacaagtaacagacatggacaaattatacgatatggctaaaaatggaattactgatgttaaaagttccaatgaaaaaggtataatcaaaaatgcaagaacaggagagtccatatacgttgattctatatcaacaactcaattattagaagttaaacaatctaaaaatttaacatcaaagatatattctaagacagtttttttgatactaatacaataaagcctcttagaaaagcaagtatatcagaagatggatgggataaaactggtggtgtaaaagcatctggtacagttacatatacaatatcaaaaggagatggagcatttcaatatatttccgttagtaaagtttctggaaactggtctattgcagacggccagattcgtgtaacaaatagaagggtgcatataaatcaaactggatttatttctaatgggctaggaattaagcagcaacaaaagaaagagccaacatcaaattctttctcatataatgcaccttctagttggaaaccagtaggtagagattcagttcaatacaattgtgggtttgaattaattgcaacattagtaagagaaggaagttcttgggcattcaatttcattgttcaaccttaaaatattttaagtgaattttattaaaatcaaagatatacatatactttaaaattagagaatgtaaattaatttgtgtttttaaagataattcctacgttatagtaacaattgcttatttactattaatatttcttaatatatgaattttattttaacaaattataaaaaatgtatattgagatgtttttaaatatttttggaaattatatatattataacaattatagcaaatttttagggtataatttttaaaattatattctactatcaaaagatatgaataaatgattgtatatattatatcaatttttatatttcatagtccattttttcatcacattttcgcttgtcaagaataatatctttaagagtgaagcgtttgatgtaaatctggactttgtttttgagacatttttgaaatatttattaaatccttcgattatacttgtaatatatattatagatattacttattttagtaaaactaaaggctgatgctacaacattccagttatttccaaacgttttaatttctgaagtatactgtttacattatttttaatctattttatctaaagtcgataaggctttttattcattaactgacctatatacagatttaaaatcacttattaattcttttgagtccttgtatgaaacatatttaaagtatttcttatctaatgtattaaacatttttgtattacagaatgaggataacttgtagctattgtctctttgaaataagtcatctgtatttactcctaaaactacttatatctgtagattttataagttctccatcttatataatttctttgattaattgttttcttaaattattcataaaaaaatctccgttacgatatttgattatatttaaatcattgccataaagaagacttttattaactttgaaaaacaaattattttacattactggtgattagttgctactttcttttgatattaattctattagattttatatagttatatatctctttctaactaagtaatataatattactgttatagtagctactaatattattgctattattgtaatatctaatcttcttgtaaataagcctattgatatatactcaagacctgttacatagcgataaagtacttctagtttaacagtttttttcttatctatatttccatatattgattctaatttattaaaatattttttactacaaaaagcagttttaggtttaattaaatatattattgtagttcctattataactattattccaataagtataagattgatatttccaaaatccatagcagatacctcctgttaaatttacttttcttaatcaaagtatatcagtaacacaagtataaagagtatctaaaatattacaaatattaaatgagaaaaagatggtaggttaaccccaccatcttattttttatctattaataaatgatgctacaaaagttagtataaaaaatgaaacaaacaatataatgaacttgtgtaatttacttagttgaaatactttattacaaaagaataaaactagtgctgagataattgcaaaaagtagatattttataatcattttatcacctattgatttcttacagattgtaagtaatatttggttacataagccccacctttattataacgcatttttttaaatttaaagatttttccagatgttatatttgaaccaagatgcattgtaattgctccaactatagcagctgcaagatactgtcctataccaggaatggcaccagccaaaagccctgcaacccctgtaccagcaccagctaaagttaatgcaactcctttagaaagatataaatcaaagcctgtcttagtccaaactattttatttgttccagcttttctataatataattcattttcaataagagtagtgtcgataccattttccttaaggtttttaattagcttattaatatctatgtatgtaactgtacctggtttaggtaattgagagtcattgatttccaagtcttctattgttgttggattgttttctatataacttgggacgttatttgaaatttccattgcattggctgtttgtccaataggtatacctataagagctgctaataatgctactgataacaatttcttaatctttggatttcttagtttcataaaatacctccattttaaattagttatatatcaaagatatatattattattgtagaatataattcttaagaattaactacattaaatattaataaaaaatatagtaaaacttaagaatacatataataaaacttaatataaattaagtatatgaaataaatatcctgtatttaagcttatagattataatgaaatataatacatattataataataaaacgaactaaaattatcacactaaagcataaaacatactctaatcatgttagataaatttttgaatatataatccaaaagtactctctaaagtagagtacttcttttttattaattatttttatatggaataaattggaatattatatttgttccaatctgattgattacatactattattagtataaaatttaattatacataaattggtaagaggtgtaaactaatgaagattaataaattaccacatgcagaactaaaactaatgaagtatatttggggagcagatgatgtattagcctcaagagatatcatagaagcaatgaagttgaaatacgattggaaaaagagcacaacattgacatttttaaaaactttagtagataagggatttttaactacttattaaggtagatagatgtacgcattatactatagctataaaagagaaagattacttaaaagttgagacaaagagtttttttagttttatgcataacaattcatttaagagttttatttcagcactacatgatgatgaagttttagatagtaagagcttggacaaattagaagaatactttaaaaatttgaaagaagaagatattgatgactaataaagctatcagtatctttttagtttgagacaattgagagtagcgtttggatttaatgttagttttatgtgatggtaaaacattatataaagaaaagtgattatttccttagtgtttgatagtaaaaaatatagagaataataccaattaaaatttaaagatatatgaaatactacaatagcttaaatcatgtaaatatgataaagatattgaaattataaaaggaatataattttagaagaaatagttgacagataaattaccttactatattattgtattaataaaataatacaataatatagtaaggaggtaataaatgaaatctagaaaacataatattacaaaaggattatttatagtttacataattattttaacatggataatactatttaagttgcaatttgatatctcatctcttgaaaccatgaatcttagaagcataaacttagtaccttttgctgggtcacttataattaataatagagtagatatatcagagattatattaaatgtggctatatttgtaccatttgggatatatgtgtgtatgctaaaagaagaatggagctttataaaaaaagttatacctatttttataactagtttagcatttgaaacacttcagtatatatttgcactaggtgcaagtgatataaccgatttgataggaaacacactaggaggaatcataggaatagctgtttttatgctattatcgaaaatatttaagaataataccataaaaattatcaatgtattggcattgattgtgacaattattgttgtattatttttaggattagttatttttgcaaacttatagaaataagtatataggtttagcttaaaatagaacgtaagatacagttacatataaaattatttacacataaaaagcacctatataggtgctttcctaaattattaaagaattattgtatcttgaaactctcgtatgttcaattcttgattttctcttgttttttctaataaatctaatgcacaatttatacaaactttaatttctgcattggtatttttctcataataagttatatatttatttctatatttatctatttcttttccacaacgactacacattacaattacgctcatatcttagttcctccatctctaattattcttaatatattcaatagtatcacttttctgaaaataatgattgttaaaactgtatcaaatttagatttactttttattataatgcattttaataaaaaaataaaggttatgggtaaaatatttatagaaaaaagtatattattgaatagattataaaattttattatttttcatcagtcttaaatacacattaatatctataaaatgacaaaataaaaaatactatttaaatagagattaaaaaattgatgcgaagtatttgtttgctatatgaataacaatttatttagaagttttgatttgacactgtataataataaagtaattgctaaaaaagtttgatgatttggatgtatttttagaaattagaaaaatatatacttactgactaatgataatcttatatatattttagtttgagtgatttaagaaaagtgttttgaaaggggattattttatagaataaatatatatatatagtagaaaattacatataaagagtagtatttatttcattaccttctttatctgttccgatggggtcttgtagagatacttgagttttattttttttgttagatctaatattcattaaaatctcattttcaatacatctagaagcatatgttgctaatcgagttcccttatctatgttataagtttctatagctttaattaatcctattgtacctatggatattaaatcatcctgatcttccgttgaattattatatttctttgctatataagctactaatctcatgtttctttcaattaatgtatcttttgcacttttatcgttttctattttaaatttagttaaatactcaatctcttcttcaggggttaagggtttttcaaaagatttaagagctgccaataggtcacccccttttcaacggtcactttaaattatatgaaggagacttatccaagttgactgttatctaataaaataatatgcatatttttagaatttaaaacatatatttgcaaacttttgaatggaatatgacataaagagtgggaatttaaatttaagtttttgttgtatatatatgaaacaaggcgaagaaattattgatttataaagtataaattggaattgaggtgtcaataaatataaaaggaaatagtatttatatatgttttggtgttgaggtaaaagattaatgcaaagcattagagtctataaaaatatgaatataggaggtgtaattttacaatacttaaaaaagtaaatgtaattaattgtttgtataaagttgattacaagcaaaaagtatcagtcatagttaattctgttaaggatgaaggtggtgtgttaatttatatatgtatgggaagaaattttgattacaatgaaaaaacttacaaaagatatttatgaaaaaacttatagttaaatgtttatatataaaatattatttaggggttgtttttattattgaaaataagaaagagtggttttatatcaatcgaatgtataataagtattgctatattatatgtggctgtttatttagtttctacatcattgtataattgttatagttttatcagtagaaatatatctgacagagaaatgttaagtacagcaaaaaaatatatagaagatgagaagtatagaatacaaaatagtaagtatgagttaattgaagataagatagaaaaaaattacataaatggatatgaaattaacagtagaatagagcaaattttagattattatcaatgctatgaaataaatatagagataaaaaatgaatttaaaaaactgaggtttaatagctatgttactagaaaataaaggctctatattaataataacattgataatattttctattataagtactgtgtgcattatgtgtataggtttaatttatacacataataatatgtttgagttaggatacaaggacattcaactaaaagaaatttctttaagtggaatagaaatatcagtaagtaatgtactttcttgtgttgaggaagctattgatgtatctaataatgaagacgaatttagagaatatttcttaggaaataatatgattgaatgtataaaaaaaataaaagatacatcttatagtagtttagaagaactttctttaaaagtagaaaataatactatttatgacagaggagatttttttgaatttgatatagaaagtaatgttagagaaaaagaatttttaaaagcaataaaagtaagagtgaaaatcaaaaatccatggataggaattgacattgaagattatatggataaatctaataacaataaaattgatgacaaaacattcaataattataaagcatctgaaaataatgaaattctaaatcaatttaaaaatgaaagtgaaaatataaggaatcaagaggttgttgaatttacagaagaagatgaagaatatgaagaagaacttaaacaaaacataattgaaaatataaagaagaattttgatgaaaaaaaactagtacaggtatataagtataggggtgtataactttgaaaaaagaaggaatgtgactgtaatagaattaatagtatctatcagtataatactcttgatagttacattatcttttccaaaagataatcttgaaaatcataaaataaatttatttgcacgtcaactttgttcagatataaggtatgttaggcgaattaatatgtttagcaactacaatacatatatatattatataaatcaaggtaaacacgaaggttatgtattgagaaaagatggtaaaaacattaaatcaataatgctacctaaaaatgcaaaaatagctagaagtattgaaataataaagtttaaatctgatgggtcgcctcaaaaggcgtctacaatagagatatataataatagattaagaaaaactataacaataacacctgtaagtggaagagtacttctgaaagagggaaaatatgaaacataaatatggttacttgcttttggaaagtgtagtatcattgtcttcaatggtgataattatactagttttatattctatatttttgtctacaataaacttaaagttaaaagtagaagataagatagaactacaacaacaaagtcttgaaatcataaaatctatggaaggaattattagcaattctatgggaataatgaatgtatctaattatgaagaaacatttaaaaagacaacgtctataaaatgtagatatgtagatgaaaataataatgaagaaagcataagtaataaagaaattatattgaatgaaagacgaaataagttatttgtaaattctttaaatggcgaaagtagtcaagcaggtggttatgaaattggagattatgtagatgagatgtatgtattaattactaataatggtcaatatgttaatattaaattgaaattatcaaaacgtagtcaaaaatatgagactgatttcaaaataaaagtatggaattttagtgaaagtatataaaaatacataaatttaagataaagaaatgacatcaataagtcatataaaatataattattgagaactatataactaaataatatcaatatgtaaagtgtatagattaagaatatagaggataataataaaaatatagaataagtaatttgccaaatacttgtttatattgtataacttatgatattatgatattagtaaaaatttgtaatcctgacttgacagaattcaagtaagagatataattttaaaggcatagtaatgtaaaatttactaaaaaataagaaatttattttaatatggaggaacaaaaaatggtatcagcaggtgattttagaaaaggtgttacatttgaaaaagatggacaaccatgtttagtagttgattttcaacacgttaagccaggtaaaggagctgctttcgttagaactaaatacaaaaacttaaaaacaggagctataagagaagaaagtttcaatccaagtgaaaaattccctaaggctgttatagatacaagacaaatgcaatatctatacaatgatggtgagttatattattttatggatcaagaaaattttgaacaaataccattaaactatgagcaagttgaagatgcaattaagttcttaaaagaaaatgaagttgctacaataagattttaccaaggacaaccattccaagtggaagcgccaaactttgcagagctagaagttacagatacagagccaggtataaaaggtgatacagcaagtaatgtaactaaagcagctacagttgaaactggagcagttgttcaagttccattatttataaatactggagataaagtaaagatagatactagaacaggtgaatatttatcaagagtataaaaatttatgtatataaaagcttatatgtcttaataatataagatatatgagcttttagtttatatataaaaaagaaagcgaggggtgttacatgaaacatttatatgaagaagttgcatacttaaaaggcctagcagaaggactagaaataagtgctgaaagtaaagaagggaaaatgatacataaaatagttgatgcattagaagtatttgcagatgctattgtaacattggatgaagaacaagaagaacttcaagattttgttgaatctatagatgaagatttagcagatttagaagaagatattgctgacatggaagaagatctttatgaagaagatgacgatgaggatgatgaggacttcagctatatagaaatggaatgcccaaattgtggagagttagtagaaatagacgaagatttgttatatgatgatgaagtagatgttgtttgtcctgattgtaaggctgtgatattatcatcagaagatgattgtgatgatgattgtacatgtggtggttgtccaagttgtgatgatagagagtaaaaattcataagaattaaaactgcctatgatgcctatgagatattttgcttcataggtagttttatttttatgaggaagggtattatgtattttggttttgcaatacttggacaaaaatagtacactagaatttatagaataggattttggagggatgtaaatatgaaaataagtaaaaaattactagataatatacaaagatttgaaaatgttataaattataaatttaaaaataaagaatatatactagaagctcttactcatagttcatattctaatgaaaataaaaaatataattttaacgaaaggttggaatttttaggggattcggttttaggcatagtgataagtgattatttatttaatgaagaagctaatctgcccgaaggggaactaactaaacttagagcaaatatagtttgtgaagattcgttaagtgaagtagctaatgatataaatttaggtattcatatgttattaggtagaggagaagaagcaacaggaggaagacataggacttcaatattagcagacgcatttgaagctgtaatagctgctatatatcttgatggaggttttgaaagtgcaagacagtttatacttcatcatatggaaaatataatttatgattcaagaaaaggaaatatatttagagactacaaaacgcatcttcaagaagtgttacaagggaatggagaaaataatatctggtacaggcttatagaagaaaaaggaccagaccataataaaagatttgtaatggaagttggaattaatgacgatgtattgggtataggagaaggaaagagtaaaaaagaagctgaacagttagctgctaaaatagctttaaagaaaaaattatgggaaaaataaatataatatgtaaaaatataaaaagaaatatttatattagaaggatgttgtagatgaaaaagagaattatacctatatttgttcctcacaaaggatgtcctcatgattgcatattttgtaatcaaaaaaaaataacaggtgtgagtactgatgttactagtgaagatgcaagaaatataattgaggaatgtttagagactatagataaagatgcagatgtagaaatagcattttttggtggtagctttactgctatagatattgatatacaaaaaagtttattatcagttgctaaagaatatgtagaaaaaggtcttgtaaaagatattagaatgtctacaagaccagattgtattgatgaagatatattaagtatgctaaaagaatataagacaagtataattgaactaggagtacaatccttagatgaaaaagtattattagatagtataagaggtcatcaatctgaaattgtatacaagagttcaaagatgataaaaaatagtggaatcaaacttggattacagatgatgattggtcttccagctgacacagaagaaaagtgtatatttacagcaaaaaaatttgtagagctaaaaccagattgtgttagagtctatccaactttggtagtaaaagatacaggtcttgaaaagttaatggaacaaaataaatataatccatttactcttgaagagagtgtaaatatagtaaaaaaagttcttgtactgttttatgttaataatatcaatgtaataagagttgggcttcaagctactgatgatatacaaattggaaaagctgttttagcaggaccatatcatcctgcatttagagagttggtagaagcagatatgataaaagattatttagaatttgttattttgcaaaataaaaatataaagcaaatgttggtcaaatctaataaaaagaatatttctaaaatcataggaaataaaaaaacaaatgttaaatatatggaagaaaaatttggtgtgcttttaaaaacacaagaatccgatttagatataaatcaattagaaattgtgttagatgggaaaagtttaattagtgctaatatgagagacattcatagaaaattgtatgacatttatgacctttagttttaataatgaagggagagaaaagatttgtatttaaaaagactagagttaaagggatttaaatcctttccagtaaaaacagatattatttttaaagaaggaataacagccatagtaggaccaaatgggagtggaaaaagtaatatatctgatgctgtaagatgggtattaggagaacagagtattaagagtcttagaggtgataaactcgaagatgtaatatttgcaggtacagatacaaaaaaacctatgaattattgtgaagtggctcttactattgataattctgaaaatcaattggaattagattttacagaagtaactataagaagaagggcttatagaaatggtgaaagtgaattttttctaaataataaaagttgtagattaaaagatataaaagaagtctttttagatactggtattggaaaagatggttattcaatcatagaacaaggaaaagtagatgaaatattaagtaataatcctttaagcagaagaaaagtttttgatgaagcttgtggcatatcaaaatatagatataaaaaacaggaagcagaaaggaatttaagtaatacaaaggaaaatttagaaagaatagatgatgtatatatagaaattgaaaatcaattaaagcctctttttaatcaacagacaaaggcaaaaaagtacttggaaataagtgaaaaattaaagatacttgaagtaaatagctttataagagaaattgaaggaatagaaaaagaattaagtgaggttaatgaacatcgtaaggttattgaaaaggagctcaatgaaaaagaagaacaaaaaaatgttgtagagaaaaagcaagaagatattaataaagaggtagaggtattacaagatgtaattgaaaaatctgtagattatataaattcaattaaaggagttatatcaaaaaaagagtcccaaataaatttaattaaggaaagaataagaaattttacgaatgaaattagtagaaaaaatttagaaataaatgatataaaagagaagctaaatgaaaataagcaatacataaaagaattagaaagtaataaattatcaggtagtgaagaactatctaccttgcaggaaaatataaaagtattggaggcaagtaaagataaacaaaaaattaagttagaatccctaaataatgagatagaattattgaaagaaagtataattgatatattaaataagaaacaagagtttagtaataagctgtccactttaaacgcaaataaagaaaatatgaatatcagagatgaaaatataaattcagagataacagagttaaacaaaaatattgaaataaaatcatctgaattagatactataaataaagaatttaatatgcaaaatgaaaatttaaagaatgtaaataatagacataaagaattatcaattaatttgcaggattcaattagtgaacacaataaactagaagatgaaatacagaaaagtaaatataatttaaatggatataattcaaagttaaatgtctatatagatatggaaaatcattatgaaggatttaatagaggagtaaaagaagtactaaaaaataaaaatttaaaaggagttcatggagcattaggacaaattataaatgtacctgaaaaatatgagaaatctatagaagcagctcttggtgcttatatgcaaaatataataactgataatgagtttagtgctaagtctgcaataaactatctaaaacagaataatttaggtagagtaacatttcttccattaaatataattaaatcaaataaagtaagtctaggaaatttaaaagcaaatactaagttcataggaatagcaagtgatttaattacatttgatgaaaagtatagaaatataattgaaaatatacttggaagaacaatacttataaataatatagatgagggcataaaatttgcaaaagaaactggtcataggtttaaaatagtaactttagatggtgaaatcttaaatccaggaggttctttgactgggggaagtctaaaaactaatgggaatatactatcgagaaaaagatacattaatgaatatacagaaaagataagtaatatcaagaatgaaatttcacatctagaattaaaaagagaatctttagacaaagatgtgaaaaatatcaaaaatgaaattgattcacatgaaagtaaaataaaagatttagaaaaaagtataataataaaaagtacaagtataaagaatgttgaatctgaaattgaatcgttaaaaggtagtattactaaattagaaaatgagaagaatgatttaaattctaatctaaattatacacttgaaaaaagcgatgatgttagaaaagatatggaagagttagatgatttatacaataaaaataaagaaaaaattgatgcattgaatgaggaaataaaaagatacaatgatttatatgataaagaaaaatctgaatttgatgaattgaacttaagtttagtgaagaaaacagaagcttataatagtatagttagagatataaaaagaatatctggtgaaaattgtgagctagaagaaaagaataaacaattagaagagtcattaaattatgaagaacatgaaataattaaattacaagattctatagccactgaagaaaaagaaaaagaaaatttaacaaaacaactaggggatagtaatagaaatcttgaaactagaaaaatagcaaaagatgatttaaaaaatagttttgatgaaattaataaagaattaaaaactatagatagacagcatatagagcttaaagaaagtttatttaaagttggtggaagattagaaagattaaaaactagtcaagacacatatataaataagttgtttgagcaatatgatatgactttagtacaagcattggaaattaaagatgaagatttggatatagatagaaaattcttagaaagtctaaagagagaaataagaagtcttggaaatataaatataggctctataaaggaatatgaggaaataaaagaaagatacgatttttatagcgaacaaaagcaagatttagaagagtctatggaagagatagaaaaacttatacacactttagaagaaaatatgaaatctgaatttgaaattaagtttgaagaaataagtaaaaattttaaatatgtatataagagattatttggtggaggttgtggagaattaactattttagataaagaaaatttattagaaagtgatatactaataacagctcaacctccagggaaaaaaatgaaaaatttaaatctattatctggtggagagaaagctttaacagcaataagtatattatttgctatattgattacaaagccaacaccattttgtatattagatgagattgaagcgccacttgatgatgcaaatatatttagatttggagaatttttgaaggatttatctaaagagactcaatttatatcagtaactcataggagaggaactatggaagctgctgattatatctatggagttacaatgcaagaaaaagccatttcaaaagttattagcttaaaattaaaagaagctcaggaaataacagatattatataacttagattgacataggaggaataacagtgttaaaaaaattatttggttttggaaaagacaaggaaaaagaaatagaaaaaaaagatgctgaagaagaaatagaagttgaagacagtgttgatagtttagaaaacttggaagaaaccattttttcaggacttgaagaagaagtgatagataaagtggaagatattgaagaaaaaactgaggaaagtgtcaataatgaaggcactgaagaaatcgaaaattttgaaaaaatagaagttgagatggatagtaatgcaaaagaagtagaaaatatttcaaataatgattctcaagaagagataatcgaagaattagaaaattatgatgaaattgagtctaaagagatagaagataaagaagataagaaagttaacttgtttgaaagactaaaacaaggattgacaaaagcaaagcaaggaataactgatagaatagatgaagttttaaaatcatatacaaaaatagatgaagaattacttgaagatttagaggaaattttaataacagcagatgttggtgtaaatacaactatggatataattgaaagactaagagataaaataaagcaaaaaggtattactgaaccaataaaggtaagagaagaacttaaatctatagttgaagatattcttacaaatgaaaactctacactagatatagaaccagcaccatgtataatattaatggtgggtgtaaatggggtcggtaagactactacaataggtaaactagcaaatagatacaaaaaagatggtaaaaaagttttattagcagcagcagatacatttagagcagcagcaacagagcaattagaaatttgggcaaatagaaccaatgtagacataataaaacatcaagagggagcagaccctggagctgtagtatttgatgctataaaagctgcaaaagctagaaaaacagatgtattaatatgtgatacagcaggaagattacacaataaggctaatcttatgaatgaacttggaaaagtatttaaaatagtagatagagaatttccagaagcaaaacgtgaagtacttcttgtggtggatgctacaacaggtcaaaatgcagttgttcaagcaaagacatttaaagaagttgcagatataacaggtatagtacttacaaaacttgatggaactgcaaaaggtggagtagtccttgcagtaaaatcagaagtagatgtacctgtaaaacttattggagttggagaaagtgtagaagacctacaagatttcaatgcaaaatcattttcagatgcattatttggtaactaatgttcttttaaaaataatggttgacaagagtgttgttatgatataaaatacaatagtgtaaagtaaataacctttacagtatactgctaggaagtgtaagatatgaatatagaaaaaatggtcgaaattggattgttatttgaacagtataaagaattattaactgacaagcagaaagaaatagttgctctatactatgaagaagattattctttaggtgaaattagtgaaaatctgaatgtatcaagacaaggtgtttatgataccttaaagcgttcagaaaaaatactaagagattatgaagaaaagttacacttagtatcaaagattcaagagcaggaaaaaaatattaagattataaaagataaaattattgacattaaagaagatttattgcacaatagagattgtgctaatttaatccctaagctagaaaatatagaagatgtatgtagggagatgataaaatgatatttgaaggattgtctgataaactacaaggggcatttagtaagttaaaatctaaaggaaaacttacagaagtagatgtaaaaaatgctatgagagaagttaaacttgctcttcttgaggcagatgttaactttaaagtagttaaagatttcataaaaaaagttcaagagagatgtgttggacaagaagttatgcaaagcttaactccagctcagcatgtaatcaaaattgtaaatgaagagcttacaagtttaatgggagatgtacaaagtaaagtaatgatttcctcaaagcctcctacaattttaatgatggttggattgcaaggtgcaggtaagactactacagcaggaaaacttggaggatattttaaaaagcaaggtaaaaaacctctattagtagcttgtgatatttatagaccggcagctataaagcaacttcaagttgttggagaaaaattggatatacctgtattcaatatgggagataaagaaaatccagtaaatattgcgaaagcaggtttaagccatgcgattaaaaatgctaatgatttagttattatagatacagctggtagacttcatatagatgaagtacttatggctgagttaaagtctattaaatcagaagttaagccacatgagatacttttggttgtagattctatgacaggtcaagatgctgtaaatgttgcagaaagcttcaatgaggcacttggtgttgatggagtagtattaactaaattggatggagatactagaggtggtgctgcactttcaataagagcagttacacaaaagcctataaaatttatggggatgggagaaaagctagatgatatagaacctttccacccagatagaatggcatcaagaatattaggtatgggagatgtcttaagtttaatagaaaaagcacaagaaaatatagacttagagaaagctaaagaattagagcaaaaaattaaaaaacaagagcttgattttgaagatttcttacaacaaatggaacaaatacaaaatatgggacctcttgacaagatacttggtatgatacctggtatgggaaatgtaaaagaccaacttggagatgtagatttgaatggcaaagaaatgaagagaacaaaagccataattcagtcaatgactacatatgagagaagaaacccaggagtattaaatgcttcaagaaagaaaagaatagctaagggcagtggaactagtgtacaagatgtaaatagacttataaaacaacttaatgaaatgaaaaaaatgatgaagatgtttgctggttcacaaaagagtatgaagaaaaggggcggcttaggcggtttacctttttttaaataaaatataaaaaagtaaaaattattcggaggtgactgtaatggcagttaaaataagattaaaaagaatgggagctaacaaaaaacctttctacagaatagtagtagctgattcaagagctccaagagatggaaaatttatagaagaaataggatactataatccaatttctgaacctaaacaagtaagaataaatgatgaaaaagctataaaatggttagctactggtgctcagccaacagaagtagttaaaaaattacttgtaaaaaacggagtaatagaaaaattcgaagcttctaaacaagcaaaataattttttcttggcaattagtttaagtaagggctcattgctaaggttactttaggagatgaaatatatgaaagagctagttgtagatatagctaaggctctagttgataatcctgactcagttgttgttgaggaatttgaagataatgatggtatcgtcttaaagcttacagttgctcaagaggatatgggtaaggttattgggaagcagggaagaatagctaaagctataagaactgtcgtaagatctgttgcaaatagagaaaatataaaagtttctcttgagatagtataaaataggaggattaggtataatgcctagtcctttttatataaatgcgtagtttaagattttatgatgatatgaccacataagattaaattttttaagaaggtgataacatgaaagaaaaattaactcattttaaggtaggtcaaatagtaaatacacaaggtttaaaaggtgaagtaagagtttatccacttactgatgatatagagaggtttgatgaattaaaagatttctatctgggaaaagatttaaataataaattggctgttgaaaaagtaagatacaaaggttctatggttataatgaagataaaaggcatagacagcatagagaaagcagaaaaactaaaaaataaatttatgtatgtatctagagaagatagcagagagcttgaagaaggcgaattttttatagcagatatgattggaatggaagttttaactgtagatggaaaatatgtaggaatactagaagatgttcttcaatactcagcaaatgatgtttatgtagtaaaaggtgaagaagataaagaatttatgataccagctataaaaaaatttgtacctacaatagatattgatgaaagaaaaatgattatagaccctattaagggaatgatagattaggtggtaatatgagatttcatataatgacactttttccagaaatatttaattcgtacatggatgaaagtataatgaagagagcagttgaaaaaggtataattgaggtttatatatataatataagggatttttctaataataaacataaaaaagtagatgattatccatttggaggaggagtggggatggtaatgactcctcaacctatatatgacacatataagcatataataacaactcacaatataagtaatccaagtgtaatttatcttactccaaaaggtaaggtatacaatcaatctatagcaaagcagatgtctttaaaagaagatataatactattatgtggccattatgaaggagtagatgagagaatcattgatttaatagttactgatgaaatttcaattggagattatgtattaactgggggagagctcccagcacttataatgatagattctatatcaagattaataccaggtgtattaaaccaagaagaatcatttgaagaagaatcatttaaagataacttattggaatatcctcattacactagacctagagattttgaaggattaaaagtaccagaagtgcttttatcagggaatcataaaaagatagatgagtggagaagagaagaatctataaggataaccaaagaaagacgatttgatttatataaaaagtctaatgaaaaataaaaatataatgaaaaattaatatatatgtatacaataaagtacctataaatggaattaaaaacataaaagtgcttgtaataactattgaagtatagtataatataaaatgttgaaaatacgggcgttcctctgtttacactggtcgggtagttaagaacgtctatgatatctaggaggaagaaagatgaatgaaatgctaagagcaattgagcaagaacaattaaaaaatgaagttcctaattttggacctggggacacagttaaagtacacgttagaattatagaaggaaaaagagaaagaatacaagtattcgaaggtgtagtattaaagagacaaggtggaggagcaagagaaactttcacagttagaaaaatgtctttcaatgttggtgtagaaagaactttcccagttcactctccaaaaatagaaaaaatagaagttactagaaaaggtaaagtaagaagagctaaactaaactacttaagaggtagagtaggtaaagctgctaagataaaagaagctagaaataaataattaaaaactttacttataaatggggggctgatttatcagtcctctttctattttaatgaaaattacagcaaataattatactagaaataaatagaaatatttgttgaaaatatacattatttatctatgaatttatagcttttaaaatgaaaaataaaattggtaaatattggattatattttgtaacgatattaaaaataagagaacagtattatgtaaagtatgacgttaaaaagatgacaatattatagtttgtgaagatagattttttaagtggaattagaatataataatataatattaataaggagtgatacatgtgtcaaatgaatacgaagagtatcttatggatgacaatctacatataaactggtatccaggtcatatgaaaaaaactaaggagttagtaaaaaataacttaaaattgattgatgtagtaattgaacttttggatgctagaatcccgtttagtagtaaaaatccagacatagacaggcttgtaggagataagccaagagttgtcgtacttaataagagtgatatggcagatagggataaattgaatcaatggattgaatactataagaaaattaatatcaaagctataccagtagatacaataaaaggtgttggtataaataatataatcgaagaatgtaaaaatgtaactagagaaaaaatgagttctttaaaagacaaagggagaaaagaaagagctatacgaataatgatagttggagttccaaacgttggtaaatcgtctcttataaacaaattaacaggtagaaaaagcactcaaactggagataagccaggagtaacgaaagggaaacaatgggttagattaaagggaaatcttgaacttttagatacacctggaatactttggcctaagtttgaagaccaagaagttgcattaaatttagcatttagtagagctataaaggatgagattttagatactgagactttggctttaagacttatagaaaaacttatgaaaatagaacctgagaagttgaaagccagatataagttagattgtctaggagaaactccaattgaaactatggatatgattggccataaaagagggtttataacaggtaaaaaagaactagattatacacgcatagccgcaactgtattaaatgaatttagagatggaaaaataggaaatataacattggaagttccagaaaacgttaaaagatagattttaaaacaaaatcaaagatttaatgttaaaaaaataaaaaagccttttagcaaaggcttttttatttttttgaaatatagacaaatatctccatataaaagtataaattaggttagaaaacctttaaaaatattaatttaagacaaatacacctaatattttgaaaattaaaatgagtgtgattattttaaattttagcatattgacttgcttgtttcgtataatatataataagcacaaataaatacaatatattaaaaatttaatttatttaattttattaatttaataataagttcttattgtttaatttaatttatttatgcaagcgtaaacaatcgagacattttattaatttaataaggttaaaaagggggattttataatgggtaagaccaaggatgttatagtatttggatttgcgttatttgcaatgttctttggagcaggtaacttaatatttccaccttacttgggaataattacaggtccagaatggttaattgccttcttaggatttacgtttgctgatgctggattggcacttctagcagtaatggctacagctaaattcgatggaaacgtagttgaaatgtttaaaagatgtggtatgaagttagggattcttataggttgtgcagacattttatgtataggtccattcttagctataccaagaacaggtgcaacaacttatgaaatgggtataatgcctttatttggaacttcaattccagtgttattattctgtatacttttttttgcgctttcatatgtactaacaataagaccttctaaggtcgtagatatagttggacagtttttaactccagctcttttaatagctctagcatttataattataaaaggtattatatcacctcttggagatatagtagataaacctatgatacctaatgtatttgcagaaggtataggtcaaggatatcagacaatggatgcttttgcagcaatagcacttgcatcagtgttaatagtatctttaaatgataaaggatattctactattagtgacaagttaaaaatgattggtaaggcgggggttcttgcttgtggaggattagctctagtttatggaggattatgtttccttggagcaactgtatcaacaatgtatggaacagatgcagtacaatcacaagtaatagtaaatataactgaaggattacttggaaatgttgggaaagcgattttagcagtagtagtatcattagcatgtttaactacatctataggtcttacatctgccacaggtcaatatttctctagacttacaaaaggtaaattgagttatgaaaaaatagtattagctgtatctgtattcagtgcagtagtagcatcttttggtgttggaactataataaagatagcatctcctatactaagtatagtttatccaccatcaattgttttaataattttagctttcttcaatgaaaaaattaagaatgataatgtgtacaaaggagcagtatatatgtcattgcttgtaagtatactaacagttatatctagttatggagtagatgttccagtagtaaaatctttacctcttcattcattaggatttaactgggtggtaccagttataatagctggaataattggtaattttataccatcaaagagtcaatctaatacacttggaacaaactaagttttgtttaattaaaatataatcaattgtaaataaatgagttaactaaaagtaaaaggagttatttgtacaaataactccttttattttgggattctataattaattatttgtatttaatatggaaaaagtataagaaaatatcaaaaaaatatatagtttattttttaacaataatagagattaaaaaagaattttagagtaattttataaatttaagtatacatattaaatgatttttacaaaaatataatataaataaaattgtgacaataataaaataataaaacaaaatttaagacatatgattatataaatgtattaaataaatgagtaaattgttttcattgagagatatattaagaatttttagttaattatgacatataagtatgtaaacgtgaatactagcaactgcaaagtttaagtaagttggaagttagaaagtaattgctatgaagaaaaataagttgataaatcataataaggaattttcagaaaaaatggttttaagactaaaagacaagaggtaaatctacgtgagtagaataaaaattgaataaagttaactgtcaatttagcaaaataaatacaaaatactacaagaattaacgttaataggtgttatgataaaaggaaaacgattttttaagaatcataattttgaaaattaaaaaaattaaaaatgctattgactgcttttttttcagattatataataaacacaaaatatttaaaatttaaattgaattaaaaagattatatgaatgtaaaaaggagagtgatatatacagtatataaagcaatacaacttaataataaaacgaataatctaaaaagtcttaatattttaattgttctgaatagttaattttatcaaggaaaattagagaaaaaacaaaaaaccaactatgtttaaagtatacaggttgattttgtttaattaagaaagttgtattaaatattgtgaagattttataaattatgaaacataattgacaaatttaagtcaaaaatgtataattaaataaaatctcgtcaaaaggttttcatttaatgaagagattggacttattttttagtaaaaggtagtaaaattcaaatgggggtgctttaaatgggtgagaaacaaatcaattttaaagatgtaattgtaattggatttgcactatttgcaatgttttttggtgcagggaacttaatcttccctccatatctaggagttttatctggaagtagttggctaatagctttcataggattcctttttgcagatggtggtttggcattattagcagttatagcagcaactaagttcaatggagacacatcgaagatgttctcaagagcaggcaaaggattaagtattgcattaggatgtgcaatggtaatctgtatagggccacttttagcaatacctagaacagcagcaacaacttatgaaatgggtatattgcctacaataggttctggaataagtccagtaatattctctatagtattctttgctctagtattggttttaacaataagaccatcaaaagttgtagatatagttgggtcaatattaactccagctttacttatagctttagcagtattaatagttaaaggtatcgtatctccattaggagaaataagagacagttctttaattcaaaatgtatttgcagaaggtataactcaaggttatcaaacaatggatgcattggcagctagtgtatttgcatcaattataatcatgtcagtaatagctaaaggttatacaggtgagaaagaaaagatgaaagccacaataagtgcaggtgtaattgcagtaataggaatggcattagtttatggtggattatgttatcttggagcaactgtgtctcaacaatatggacaagatgttcaacaaacagctttaatagttgcaataacagcagctttacttggaactacaggtaaaattttattggctattatagttgcattagcatgtttaacaacagctataggtctttcttcagcagctggtcaatatttctcaacacttacagatggaaaattaaagtatgagcatatagttatagtagtttgtgtatttagtgcaatcatatcaaactttggagtaagtacaataataaaattctcttctcctatactaagtatggtatatccagcaactataactctagttatactagcattatttagtaataaaattaaaaatgacaacgtgttcaaatgtgctgcatacatggcattattagtaagtgtattaacagttgcaacaagttttggtgtaaaaattcctctagttaatagcttaccatttgcttcattaggatttaactggatagttccagttgtaatagcaggaataataggaaactttattccatctaaaagcagtaaaactgcataataataaaactaattgataattgtggaattgcctttaaattatatggcaattcctttttatatttaaaagaattattaaattattgtggagaaaagaacattattaatctcatttgataaatttatttttggaggagtatgatttataaagacaataaaataaaaaagatttatttataattataaataaaattaaattatatattatgaatgtttaatattaatataaaaacatcaatatatatttttgtaaagaaaaaataaagaatttattttctgaatacttattaattaatcaaagttaaaatgaaaaaaatataaaaaaataaagtatataagagtataatttgacttttatatacttttttatattatttttgagttttttaggaagatattttacaagttaagaaaactataaggagtgttatattgaatataaaatagtataatatatattatgttagataattaatatgaaaatatacaaatatataaaaaagtttgtttagagttatagttaatgtgtgtattaatttaatactaatttattggaggtttaaaaatgaaatacataataaaaagagatggtacaaaagaactttttagtaaaagtaagattgaagatgctgtctataaagctagtataaatagtgaaggtggagtagatagagagttggcatatgatatatcaagaaaaatagctaatgactataattctatggaaaaatgcttatccgtagaagaaatacaagatatagttgaagtactacttatggaatcaaatagaaaagatatagcaaaacactacatattatatagagaaagacgctctgaaataaggactaaagcttgggagtttgatgaattacaaaaatcaatatggaagaacaagtatagacataatggtgagagttttgatgaatggataaagagaatttcaaataatagttcaagaatatcaaaactaataagacaaaaaagatttctatttgctggaagaattttagcaaatagaggattacagaaagaaggaaaaaaagtaacatattctaattgttatgtaatagaaccaccaaaagatagcatagaagatatatttgatactgcaaaaaaacttgctagaacttttagttatggtggaggagttggaattgatatttcaaagctaagaccaaaaggagcgaaagttaacaatgctgcaaaacatacgactggagcagtctcttttatggaactttacagtatgacaactggcttaattggtcaaagagggagaagaggagctcttatgatttctatggatgtaaatcatccggagatagaagagtttatagatataaaaacagatttggagaaggttactaaagcaaatatttccataagggtaacagatgaatttatgcaagctgtaagggaaaaaaagttatataattgtacttttgaagttgaaactactggagaaaaaatagttaagatagtaaatgcttatgatttatttaataaatttgtgaaaaataactgggattatgcagaaccaggtatattgttttgggataaaataaaaacatataattttatgagtgaagataagaacttttgcttttcaggagtaaatccttgtgcagaagaaccacttccaagtggaggaagttgtctacttggctcaataaacttgtcagagtttataatacaaccatttggtgaacatgctacttttgatattaataaattaaaatcttgcgttagagaagctgtagtagctttaaatgatgtcttagatgaggggttgaacttgcatccattacaagaacaaagagatagtgtacataagtatagacagataggtttaggtgtaatgggtatagctgatatgcttataaaaatgggaataagatatggttctgatgaatctttagaactatgtgatttaattggtaagactatgttaaatgaagctgtgaagcaatcagcattaattgctaaagaatatggaacatttagtgagtataaatatgaaaatatttctaaatctaagttttttatagaaaatctaaatgaagacactaaagaaatggttaaaaagtatgggcttagaaattcacaacttttaaccatacctcctacaggttctatatctacaatgataggtatcagtggtggaatagaacctatatttaatctttcatatataagaaaaactgaaagcttgcatgatgaggatgtgtattataaagtatatactccaattgttaaagagtatatggacaagaaaggtattacagatgaagaatgtttaccagatttttttgttactgctatgaatataggatatgaagaaagaataaacatgcaaaaagtatggcaaaagtatattgatgcttctatatcatctacaataaatataccttttgaaactacagttgaagatgttttcaatatatatattaaggcatgggaggctggtcttaaaggagtaacaatatttagagatggatgtaaaaggagtggaattttaataaatgaaaaaaaggaagaaaataataaagaagataaaaaagaaaatagtaaaaaagaatattataaaaataataaaaaagaaaaagataataaagatgaaaaagccaaagaaataataaataaaaattttgaagaagatgaaaaatttgtgtgccctgaatgtggaagtgaaggaattgcacatacaggtggatgtagtatatgtttaaaatgtggctatagtggatgcaattaaactctaattaaaaaattttaatatatttaaaaattaaatttttaaaaacgaaagatgagggaatggtatgcaggataaaagtgtgagggagattaaagaaataatagagactttagaagtagaaaaatatatggaatatatagaactgttaagagttgatgaaagaaaatctgtacaaggtctagctataaaactagcaaaaaagctggataatattagaaaagaagaagaaagattggaaactataaatatatttgagaacgaaggctatgataaaggttatttgtatattggaggaattgatgaggcgggaagagggccacttgctggacctgttgtagcttctgttgtagtatttaaaaaagatacaaaaatagaaggtgtaaatgactctaagaaactgagtgaggcaaaaagagatgaactttttgaagtaataaaagaagaagcactagattatggaataggtatagtaaataatgaagaaatagatgaatttaatatattaaatgctacatatatggcaatgaaaaaggctataaattgtttaaaaaaagcaccggattatttattagttgatgcagcaacaataccaggtattgacatatctcaaaatccaattgtgaaaggagattcaaaatctatatcaatagcagcagcaagtatacttgctaaagttactagggatagtataatgtaccaatatgatagagtatacccagaatatgggtttaaatctcacaaaggatatggaactaaagaacactatgaagctattgaaaaatatggcataactcctatccacagaaaaagttttttgaaaaatatactgtaaatataatatgatataatgtatataatataaattactatagttaatgggggattaaagatggaatataatgaattattaaaaagtgctagagaaaatttaaatggaagttgtaaagtttgtaaggtttgtaatggggttgcttgtgcaggtgaagtgcctggcatgggaggtaaaggaagtggttcttcttttatagaaaatagcaagagtttagaaaaagtaaaagtaaatatgagagtaatacatgatgtatcaaatcctgatacatctatagagatgtttggaaagaaaatgagtgcacctatatttgcagctccagtaacaggaactactttaaatatgggtggaaaaattaatgaaagagattacatagaaccagtagttgcaggatgtgctaatagtggtatttatgcaatggttggtgatacggcagtagatgcttttttaatggaaaatttagatgtagtcaaaaagtataatggagctggaattgtatttattaaaccttgggataatgaaaatattataaaaaagataagattagctgaagaagctggtgcatttgcagttggagttgatatagatgcctgtggtctagtaactttatcattacatggaaaaccagtacttcctaaaaatgttaaacaaataaaggagttagtaaagtctactaaactaccatttatattgaaaggtataatgactgttgaagatgctttaatggcagtagaagcaggtgtgtatgcaatagttgtatcaaatcatggaggaagagtgcttgactgtacaccaggagcatgtgaagttttaccaaaaattgctgatgctgttaaaggtaaagttacaatacttgcagatggtggagtgagaactggtttagacgtactaaaaatgataggtttaggtgcagatgcagtattaataggaagaccttttgtgactgcttcatttggtggtgcaactgatggtgtagaaacttatgtaaataaacttcaatcagagctaagtagttctatgatattaactggatgtcaaactataaaagatattgatggaaaagttatatacaaataaaattttatacaaaaaagaggaaaaatcattttaatgtagaataattgtacaaagggggaatttatatgagtagaaaagcttatgaagaagccttagtagaattagaaaaatttattgatgaaagaaaagaaataattaaaagtgcggaggactgtattgataagtacatagttgacagaacgctaccttttgattacaaagataaatgtgtggaatggcaacaagagttacttgatattgcagaggcacaagttttagaagcaaacgaattaggtgttttactggaagagaaaaaagaacttgaggaagagtaagttttattactaaatctagggaaaatcaagaatatgatttacccctagatttttttatttaaataaagatgtctatataattaatctatctttatcaatgttagattaaaaggtttgaagaaaaatagagtaattgtatgaatagttaaacaattaaactagtctataagaccaatttaattgttattttttgaatttagtatatggtttttcatttcttctaatacaattgtgtaggatttgcattgtgctgcagccaattctgacaaagcaaacctttgagccttatttagaaagtccttatctgtgctacatagttgttttgaattatcttgtatcataagcatcttaattaattttacaatctcaaaaacatctcctgaatgaaatttatcatggtatagtttaagtcgtttttttctatcaaaaacccataaacaatcaaccttatcaagggattggataaagttttcaacttcattttcatccataattggacgtacaccaatcttatcagcatttaaaactggaatcgaaattttaagattactattgtaaataacagtcaattcatagtatttctgtatatgatgatttatatcctttgttacaagaccacttatataacaggctccttcttttggatacattacactttcaccgattttatacatatggttatacctccaaactgaattttagatattgcaatttgggtacaatgctttaattatctaataattaatattatatcacgaaatgcttgacaagtcaaaaagattaatatataataaaaagtttagaataatagatatatataattggctataaaaatataagataagaggatttaatatattaaaatatctagttagtattgtataaaataacatactaactagatttaataattattaatttctagcaaaatctcttaagttaagacttccggctgttacaaataccattccaataagaattaaaacaattatatttattaatatattaccattattattaatagcatctatagtccaataaaatggtgtaagctttgaaagattagccataaaggataatttatcaagtgatggtatcatattagatatggatatagctaaacctattaaagaataaaacgtagacataagacttatagaaccttcgtttttaaacaccctagctatccaaaatacaaatccagtagcaacaaaactatttgctagtacaatcatcaatgtatttagagtcaatttaaaattacttatagatgtgaaacatactaaagttaaggtgtatacaattgcttgagtaaaaaataaccctaaaaatatgctgaaaattatttttatatcattatgctttgtagaaacaagtctttttaaggtattagatttctttaatgaaaataaatcagaagctagatgtgctgcattaatgtacatgaaataacatatcaagaaaactattaaaaatgaatttttattcttacctgaactgttatcaattatatttgtcttggtcaatttatcatctatatttctatctatttttaattttaatgaattagtaataaaagattctatttgtgattctgcccaaagactacctccaccattttcagttttaaaacatttaacctcaggtcgttttaagttatctatattgcttgaaaagtttttatctaaaatgaagacagcagaaactttattattttttaatagatccatagccttgtcttgttcgtttaatccaaatgagttttcttttaatttagaactatctattaacttatgttcgtattttccagaagaattggatacaatcgctactggagaaaagtacattgattgattttctgagttgccagtaaaaaagttaagataaaacattaatataacaggaaacaaaaccatattaactaaaagagcatgattttttatatatctttttatgtttgcaatagtcaacctaatcattattaaacctccctccatttatatttttcttttacaatagaaagtgcaatcaatactgtagatgcaattaggcatgtaaaaattaaactttctattgaatctatagttttaaacgtctcataattactgaacaatgttcctattaaataagtaggagataaacttgtaaacttagtaaacacatcatttactatgctgaaaatacctccaaaaactgtttgcaagaagagtaatgcataaactataactgtaccatatttcttgctaaaaaaggtagttataaaagtagatattgaagtcataaaataagaagctaaagcacaaagtaaagctaatataacaaagttacctttgaatgttacaccgagtgttctaaaaaataaaacgtataatgataaaaatataaatgagtaaatccagaaacctataaaatcataaattaaaaattgtactctagttacaggtatagagtagagtctttttgaaagtccttttgattcacttacataatttgataaaatgctattcattataaaaattattgcgaagaatccaagggaaactaaagcaaagtactcataagagttttgtttaacattattttttattatagaggtatcaatagaattcttattaaataattttgagaaatcttctgaacttaatttttgagaattattcagatataatttttcatgataagtatctaatatatcttgaagtaatattgcaatattatcattagatttaagtttttctatacttagattatttgatttttcatttaataaattattctcatatcctttaggtatagtaagttttaagtctgccttagaatcatctttttgaactgttaatatagaagataaatcgttttttagatatcctgtcaaattacttgatagctttgtattatctttatcatatataacaattgatgtcaaatctgtttttataggattttgaaatatactttctgtcaccatcccaagaaatccagctaaaactagaggtaaggctaagaaatatattaaattaagcataaaggagctttttaaaacttttagcatagtttttacactaatgtacaatttcatgaaatcacctccattagtcccttaaatttttacctgttagatttaaaaatacgtcttctaaactaggttcttcataagatattcgtgttatttttgaattatttttgtcaacaacagataatacatctgtaagttgtaattttttgtctacacctaattctaataatgaattattttctaaaatagatacaacacctttagtattttttaaatcaaatataagttgagcatttatattttttatttccataattaattttgtatttgtagatactaatgattttaaataatcattatctccaaaagcaatctctttaccttcatccataataaaaatcttagaacaaagatgctcaacttcttccatataatgagaagtatatattactgtggttttttgctttttagatatattttttataaaattgaaaatatggtttcttgattgcgggtcaacacctacagttggttcatccaatattaatattttaggatgatttaaaagtgctattccaatgttcaatctcctttgcataccaccagataattttttgatttttttctttttaacatcagtgagtcctgtgacttctaaggcttcagttattctctcttgaagcaattttccctttagtccatagtaagtgccaaagtactctaagttatcaaaaggagtaagagtctctataagtgctaattcttgtggaactaatcctattatagactttgcttttatacaatcttttgacaaatctaaaccattgatttggatgtcgccactatttggtaacataagatttgtaattatatttataagtgtagatttaccagcaccattcggtccaataagtccaaatatctctccttctttaacagaaaagctgatattatcaagtgctaatttatcattaaatctttttgttatattatttactcttactatatccataataattcctcccaaaataattttgtataagttaaaaatctataatactataataaagaattatgaatcataattctattactataagtcactaaaaaaagtgacttaagtcactttatattttcatttattataaatgagtttgtgagtaagaaatttctagggtatagatttcttacctatatatttatattacaattttatttttgaaggcaaatataactagttgtgtcctatcacgaagctctagtttccctaagatattggtgatattattctttattgtaccttcagataagaataattcttggctgatttctttgttgttaagtccatttgcgattaatctaattatggatatttctttttctgttaaattatacatatcagaaatatgtttttgttctatagttttttgagggtacataattttttcagccacacttttatcaagtacaatatttccaaaaaacgaggaacgaatcccttcatgtaatacttcatccgaactatcctttaaaagatatcctgaagccccaaatttcatagcatcttctatgtactcatcatcattaaaggttgtcaaaattaataatgctatagagctatcatattcttttataagtcttgtgcctagaactccatcacaaactttcatccgaatatccataagaactatgtctacatcatttgttttacaaaattctaatgcttcatatccattggaagcatctcctacaatttctaaatcgtcataagatgataaaataatgttaagaccttttctaatcaatttttcatcatctactataagaactttgattttattcaaaaaaatcacctcctgaaaatttaggaaaagacgctctaattgtgaatccagtattagaattatcgaattcaactttaccatttaattcatatattctttcgctaatactgctaagtccatttcctctttttatattgttacaccctataccattatcgctgatagtaattataagatttgaaggattaaatgttataaaaattctgatttcagttgcttttccatgtcttgatgcgttggaaagagattcctgaacaagtctatataaagcgatagattgatttgtagataggttccaggtattttttgatatagttaatctaacgttgatatttgtaagtttaataaagctattaaccagttctctgattttaagtaaattttggtaattttcatattcaatgggttttagttcagatatagctcttctcacatcttgaaaactttcagttacaaactctctaagttcatgaactaaatcagaaatgagaggtttgtcttttaagagtttttctatagcatttaattggattatcgtcgtagaaagagaatgtcccacactatcgtgtatttccctcgatatacggtttctttctttcaaaattgctaactcttctatagaatttgcataaatctctaaatcggcattagctttttttaattcatctttagaaaccctgagtttgtcataaagactttgattgtataatttagataaattctcgttttctagatacacagaaaagagggttataattagtaatgtagaacttgattctagtgctaaatataaatttttatctaaaccaataataaaagaaaatattataactaaagagaataatatatatttatatttttcctttattaaaaatgaggcatccaaaattaaagaaacatagtaaagtggattaaaagtctttatatacttacaaaatataaaaattagaataagctctaaaaaataagaaataagtataaatttattctcacttgataaagaaaaaaatctaacttgattatttattattagaaataatataatcattgttatagctggatacaatgtattttcagtatggtttaaataacttataagtaatataaatagagataaatatcgtataaaaataaatgttttttttctgttcattaaagacattcctccataaaaataaactttcattataaaaactagcataatatcataaaagaataaagtcaatagaagtatttattaatatcaatggaaataaaatcaatttcaaaaaattgaatagttaaattgtatactgacgataatttaaaagtaaaaatttaatatattggagtagataatgaataataaagaaaaaggtgattttggagaagaaatagcagttaattatctgctatcaaaaggtgcaaagatactagaaaaaaattatagattaaggataggggaggtagatataatagcaaatataggagatgaagttgtatttgtggaggtgaaatcaaggtctaacataaagtatggctacccttgtgaatctgtagattttaaaaaaagaaaaaagataattggtgtcgcaaaatactatattataaaaaataacttaaataatactcccataagatttgacatcatagaggtctatttgttagaaaaaagaataaatcacataatgaatgctttttaaaaaagataatgtttttggaaaggattaaatatgttaagtattattaattcaagcaacttagtaggaatcgacagctttttagttaaggttgaagtagatgtaagcaatggaatacctagttttaatattgttggtcttccaggcaaagaaattaaagaagcaagagaaagagtaaagtcagcaattcttaatagtggatataaatttccaagcacgagaatagttgtaaatttatcaccagcagatataaaaaaagaaggagcttttttagatttatctataagtataggccttttaagagagttaataaaaaaagatgaaaattacataagagaaagtatgtttataggagaattatcattagatggaaaaataagaaaagtaagagggatattgcccataattatgggtgcaaaaactcagaacataaaacgtatttttataccaattgagaacataaaagaaagtctattagtagatgaaattgatataattcctattaaaagtttaaaagaatgtgtcgattttttaaacgaagagataaaagtcgataaagtaagtataatgtcttttttggatgataagtcaagaaaagagaacggagaattagaaaaagataatagttatatagattgcaaatatactaagattaataatgaagaaagtaaatatgatgaagactttaaagatgtaaaaggaaattattttgtaaagaggagtgcagaaattgcagcagctggaaatcataatatgtttatgattggacctccaggctcaggaaaaactatgattgcaaaaagagtaaggacaattttaccagatataagtatagaagaaatgatagaagtaagtaaggtttatagtatattgggtatgataaatgaaagtaaaggaataattgataaaagaccttttagagcacctcatcatacaactacaaagcaatctttaattggaggaggaatggatgcaagacctggagaaattgctttagcacatagaggtatcttatttttagatgagatagccgaatttgatagaaaaatacttgagactttaagacaacctatagaagatggatatgtaaatatatccagagtaaagtacagtgcaaaatatccttgtagagtactgttagttgcagctatgaatccatgtccatgtggttattatatgtcagagacagagtgtagatgtagaagtaacgaaattgatagatacataaataaaatatcaggtccattgttagataggtttgatatttttgtagaagttaattctataaaatattcagattttaattctttaaaacaagaagaaagctctcaaaaaataaagagaagagtagaaaatgctagaaaaatacagataaatagatttaagaaagataatataaaaaataatagtgaaattaaagcttacaatttatttaaatattgtaaactggaaaaagaagcttcaaaaacggctgagatgatatttaataaatacaacctaagcagtagaagttatacaaaacttttaaaaatggcaagaacaatagcagatttagaagaaagagacttgataaattcacagtgtattatagaagctttttcatttagaaaggcttattatagttattttaaatagttttttgaggtggattttatggaaaaaagagatacttatttatggttaaaatcaattggtggaataacaacaaaaacaattgaaataatagaaaatgaaatagtaaatattgaagatatatttgatttttctgaaaaagaaatatataatttaaaaaatataagcttgaatattagaaaaaatatagtaaaatatagaggttacgcttatttagaaaatataaaagaactactttacaaaaaagcgattaaatatatttgtaaatatgataaagaatatcctgaaaatttaaagaatatatacaacgctccaaagttattattctacaaaggtgacataggtttagttaataataattttaatatagctatagtaggttcaagaaaacctacagcctatggaattaattgtgcaaaaacaataagttgtcaactatcccaatatggagttaatatagtaagtggattagctataggaatagatgcatactcgcacataggttgtatgagtggaaaatctaaaactatagcagtacttggttcaggagtagacaatcctcttccaaaacaaaatttacatttatcaaataaaatattagaaaatgggggattattattatcagagtataatattaactcgacagtagccccgtaccatttttctaatagaaatagaattatcagtggtttaagtgatggagtagttgttgtagaagcagcaataaaaagtggtgcactaatcacagtagattttgctcttgaacatggaaaaaatgtttttgcaatacctggtaatataaattctcaaatgagtagaggttgtcataaaattataaaagaaggtgcaaaattaattgaaaatatagatgatattttaaatgaatataacatatttaatattattgataaaaaaataaatcaaaaatatgataatataagtctaaatgccaagtctaagcaaataattgaagctataaaaagagaaggaaacttgcatatagatagtatttgtgattatactggtatagaaataaagtatgtaaattcaataatcaatgaattagtactaaatgagttagtagtagaaatgaataataaaacgtacagtttaaatgtataaattaagattaggtagtgggggtgtatggttttatggccaaaacattagtcatcgtagaatcgcctgcaaaagctaaaactatagaaaaatttttagggaaaagtcattacacagttaaagcatcagttggtcatgtcagagatttacctaaaagtaaattaggtgtagatatagaaaataattttgaacctcaatatataaatataagaggaaaaggcgatgtaataaaagaattaaaaaaagaagctaaaaaatctaaacaagtatatctagcaactgaccctgatagagaaggtgaagctatatcatggcatttagctcatatactaaatttagatgaatctgaggattgtagaatagagtttaatgagataactaaggatgcaattaaaaaagcaattaaacatcctagaaatattgatataaatttggttgatgcacaacaggcaagaagagtgctagacagacttttaggttatcaaataagtcctatattatggcaaaaggttagaaaaggtcttagtgcaggtagagtgcaatctgttacaacaaagttaatttgtgatagagaaaaagaaataaaggcatttattccaaaagaatactggacaatagatgttgaggctaagacagtaaaagacaaagatataactttgaaattttatggtaaaaatgatgaaaagattgaattagaaaatgaagaagctgtaaatgaaatactaaaagaaatggaaggtaaagatttaaaggttgagaagatagaatctaaatcaagacgtaaatcagctccaaaaccatttacaacaagtatgcttcaacaagaaggagcaaataagttattttttactactaaaaaaacaatgatgatagcacaagaattatatgaaggtatcgacatagaaggtgaaggtactgttggtcttatatcatatataagaactgactctaaaagaatatctgatgaagcaaaagaaaaagctaagggttatatcgtaaacaatttaggagaaaactactataaaaacactggtgataaaaaagaaaaaaaggatactaaaaaggttcaagatgcccatgaggcaataagaccaacctcagttgatagaactccagagagtataaaagcctcattgagcaaagaccagtacaagttatacaatttaatttggagaagatttgtagctagtcaaatggaagattcagtgtttgatatactaaatgtagaatgtaaaataggcgatattgtatttaaggcaactggttcaaaaatgaaatttgatggttataccaaggtatataatttttcagaaagagaagacaaaattttaccaagtatagaaaaaggagatatattaaatatagaaaatatattgccagaccaacattttacacaaccaccagcaagatatacagaagctagtttagtaaaaacactagaagaactaggtataggtagaccaagtacgtatgctccaacaatagctactatactgaatagagagtatgttgaaaagcaaggaacaagtctatgtccaacagaacttggaataatagttactgatattttggaaaataatttccataaatttatagatgtagattttactgctgatatggaaagtaaacttgatgttatagaagaaggcaatacagattggaaaaagattgtatcagaatcatatgcaccacttaaagaggctattgaagaagctcttgaaaatatagaaaaagtaaatatggatgaagaaactgatgagatttgcgagaactgtgggtctaatatggttatcaaatatggtagatttggaaagtttatggcttgtaaaaactatcccgattgtaaaacaactagaccaattatgaataaaattggtgttaaatgtccaaaatgtgaagaaggagatattatacttagaaaatctaaaagaggtaaagctttttatgggtgttctaattatccaaactgtgactttgtagcttggaataagccaacaggagagttttgtgagaagtgtggttcatatatggttgaaaaagtgactaaatctgaaacaaaaacagtgtgttctaataaagaatgtaataaagagacaaaagagcataatgacggaaaagagtgaaaattgaaaaaaatcacataattctcttgaaaaaggttccaatctatgataatctttcaagtgtaaacaactaatagaaaaataaattttcattaaatgtgaaaataatattagaaaatataaaaggttattaaaaggcctaaatttcatgaggagatgattaaatggcaagtgaagtgttacaaaaaacaaggaaaataaataaaacattacaaacaagtggtggaagcagtgtctcttttgatttactggccggagcattgggcgacgttttaagttctaatgtttatgtagtaagtgcaaaaggtaaagtactaggtcttcatttaaatgatgttcaagacagttcagttatagaagatgagtatactaagcaaaagaaattttcagatgaatatactcaaaatgtgttaaaaattgatgaaacattagaaaatttaaatggtgagaagatattagaaatctttcctgaagaacatggaagattacaaaaatatactacagtagttccaatattaggaagcggtcaaagattaggaacattggtactttcaagatattcaaattcattcaatgatgatgatttagtaatagctgaaaacagtgcaactgttgttggtcttgaaatattaagagcaataggtgaagaattagaagaagaaatgagaaagaaagctgtagttcaaatggcaataggcactctgtcctactccgagcttgaagcagttgaacatatttttgctgaattggatggaaaagaaggtctacttgtagcaagtaagatagctgatagagttggtataactaggtctgtaatagtaaatgcacttagaaaatttgagagtgcaggtgtgatagaatcaagatcattaggtatgaaaggtactcatataagaatacttaatgacaaacttacagatgaattaaaaaaattaaaaaacaatcaataatctatattttataggtttagattagaaaaggtatctatttcaaatagataccttttttagacgaattattaaggtaatgataagtatattaaaaaggagtgagaaaatgcctttagcagataaaataagaccaaaaacaatgaatgatgtaataggtcaaagtcatataataggtaatggaaaaatattgtctaagatattacaatctaattttttaccaaatatgatattttttggtcctcctggtgttggtaaaactacagtagcggaaataatagcagaaagaagcaataaaagcttctataaaataaatgctactaattcatctttagaagatataaaaaaggtgatatcagagcttggaagtataaataatgtaaatggagtcctattatatatagatgaaatacaaagttttaataaaaaacagcaacaatcaatattagaatttatggaaaatgggagtataactttgattgctagcactacagaaaatccatatcattatgtatataaagctcttttaagtaggtctactgtatttgaatttaaacctttagaaaaacttgatatagaaaaaggactgaaaagagctgttgaagtattaaatgaagatagctatatggatattgagtgcaataataatgctattgaagatatagcaattctttctgatggagatatgagaagagccttaaatattttggaagtggtagtctattcaactaaaccaaataaggataatataacttatatagattcagatgtaataagggcatctacatttaataaaattataaactatgacaaaaatggtgatagtcattatgatattttaagtgcatttcaaaaatctataagaggaagtgacccacaggcatctatacactatctagcaagacttataaaaggtggggatttgataagtatatgtaggagacttttagtaatagctagtgaagatataggtttagcttatccaaatgctattgtaattgtaaaggcatgtgtagactcagctatgcaacttggatttccagaagcgaaaataccattagcagaagctactattcttttggctacatctccaaagtctaattctgcatgtatagcaataatgaaagctatggatgaactggataaagagtttgttaaggatataccaaatagtataaaggatgctcactattctggttctaaagaaataggtaggggttgtggatacaaatatcctcataattttaaaaatcattatgtaaagcaacagtatttaccagatagcataaaagatagtatttattacataccacaagaaaataaaactgagaaaaatataaaaaaatatttagaatatctaaatagtgatttttagactgaattttatgtatcgggggtagatattatgattataaaacttaactcaacttatcacagtagagttatgaaatacttaaaaaaagaacctgagtacaatttgtttataataggggatattgaaagatatggatatggaaataattttttaaatatatgggcagacgtgggtgaacatggtgaaataaaggcaatattacttaaatattttgaatttatgatgttttattctgatggagagtatgatgttgaaggtttttataatctacttcgtaatactaattacgaagaaatatctgggaaaatatgtgctgtagatactttagcaaagagattaggacttaataatttaaaggtagttgatttttgcaaacttcaaactaaaaagtttttgatagataataattgtaatgcaaaggttaagagaattaggcttggaaatctaaaaaagacagtgaaactttatgacttaatagatgaatttcacagtacaactttagagaatttaaaaaatggactaaggacaggtagaggatattgtatagagattaacaaacaggtggtgtcaatggcaaagagtacttcagaaaataggactcatgcaatgataattggagtaggaacacatcctaaatatagagctaaaggacttgctacaaaatgcctaattaaactatgttcagagttactgagagaaaacaaaattccttgtttgttttatgataatgaagaggctggaaagatatataaaaaactaggatttgaaaacattggaaaatggggaatttattcaaaataaaaaattaaaattaatcttgacaaaattagtagggtataataaaattatcttgaaagtaattcctactaaaacagtatgaattagatttctatatagaggtgataatatatgaagttgtctactaaaggtagatatggactaaaagcaatgtttgaattagcattaaatcaagacaatggaccagtatcattaaaatttattgctaagaagcaaaaaatatcagatcagtacttagaacaaatattttcatctttaaaaaaatcgggtctagtaaaaagtgtgagaggtgctcaaggaggttatttgctttcaaagaatgctgaagacataacagtaggagatatacttgtagtattagaaggaccagttgcattatctgactgtgtactagatgaagatgtatgtgaaaactcaaacatgtgtgtaacaaaaatagtttgggaaaagatgaaaaagggtatagaagatgttatagattcaattactcttaaagatatgataaatgactataacaaaaataaattagaaaatgatataacaaatattaaaaaatagatttggagatgaatgtaatggaaaaaagaagattgtatatggattattctgcaacaacacctattaaaaaagaagtattggatgcaatgatgccatacctaacagattattttggtaatgcatctagttttcacacattcggaagagaagcaaaagatgctttggataaagcaagagaacaagtagcagcccttataaatgctgaacctagtgaaatatattttacagcaggtggttcagaaagtgataactggacactagagggtgtagcttatgctaataaaaacaaaggtaatcatataataacttcaaaaatagagcaccatgcaatacttcatacatgtgaatacttagcaaaacatcatggatttgaaataacttatttagatgttgatagcgaaggaagagtagacttaagacaactagaagattcaataaaagatactactatacttataagcataatgtttgcaaataatgaaataggaactatacagcctattaaagaaatatccgaaatagctaaaaaacataagatattattccacactgatgcagtacaagctacaggtaatattccagtagatgttaaagaattaggaatagatttgatgagtatgtcttcacataaaatatatggaccaaagggtgtaggagctttatacataagaaaaggtgtaagacttcataactttgtccatggtggagcacaagaaaaaagcaaaagagctggtacagaaaatatacctgcaatagttggatatggaaaagcagcagaattagctaaggaaaatatgcaaaatcatgtagaaactttaactcgtcttagaaataagttaatagatggtgtgttagaaagaataccttacacaagagtaaatggtagcttagaaaatagattgccaggaaatgcaaactttgcattccaatttatagaaggtgaaggaatacttttattattagatatgttaggaattgctggttcaagtggttctgcatgtacttctggttcattagacccttcacatgtacttcttgcaataggtttaccacatgaaatagcacatggttcattaagacttacagttggagattttacaacagatgatgatatagattatatactagagaacttaccaaaagtaatagaaagacttagaagcatgtcaccactttatgatgatgcgaagaaacaaggtttagtaaaatagacagaaagataaagcataaaaaatagacataaattgagtaggaggaaaagataatgcaatatagtgataaagttatggaacattttatgaatccaagaaatatgggagaaattgataatgcaagtggtgtaggtgaagttggaaaccctacatgtggagatataatgaagatatttttagacatagatggagatgtaataaaggatgttaagtttaaaacatttggctgtggttcagctatagcaagttcttctatggcaactgaaatgataaaaggaaaaactataaaagatgcattagaacttacaaataaagctgttgcagaagctttggatggtttaccaccagtaaagatgcattgttcagttttagctgaacaagctgtaaaagcagctcttatagattatgctcaaaagaacaatatccatataccagaattggatggatatgttatagatgatgctcatgaccatgatgttgaagaagaagaataaaaataagtgattgtgttatgagaagtttacaatgattaaaaagaagtactaatgatataattaggacataaaaaatagctgtttttaaaatggctattttttattgcctaaattaagtattttaacttgatttagaggttaattagttaacaaaataatccataagattcaaataataaagatgattatttttttagaaaatagaacaagctatattttaaataagtacaatacttgctctatatggtataataataagtaatgcaaaagatgaggtgaaatttgtttatgaataaaaaagtaatgataggtatgagtggaggagttgatagctctgtagctgcatatcttttaaaacaacaaggatatgatgtcattggtgttactatgaagttgtggcaagatgatgatgttgttgaaattgaaggtggttgttgctctttatctgctgttgaagatgctagaagggtagcaaataaaataggtataccattttatgttttaaattttagagaagtgtttaaagaaaaagtaatagattattttatagatgaatatttggaaggaaaaactcctaatccctgtatagcttgtaataaacatataaaatttgatgatttttataagaaggctagacaaataggttgtgattatgtagctacaggtcactatgcaaagatagaaaaggatgaaagtacaggaagatatttgctaaaaaaatctgttacagataaaaaagaccaaacttatgcactttataatcttacacaagagcaactagagcatactttattgccaataggtgactatgaaaaagatagagtaagagaaattgctaaggaaatggggatggcagtacacaataagcctgatagtcaagaaatttgttttgttaaagataatgactatgcaaattatgtaaaaaaacattctaaaaagcgtattgaagaaggtttttttgtagatactaaaggcaatatacttggaaaacataagggtatattatattatactataggccaaagaaaagggcttggaattacttttggaaaaccaatgtttgtaatagacataaatccaataaataataccatagttcttggagacaatgaagatttatttaaaaaggaacttattgctaaagatgttaactttatatcaatagatacgttagaagaacccttaagagttcaagccaaaataagatattcagcaaaaccatcaccagctactattcatagagtaggagaagatactattaaaatagtttttgatgaagctcaaagagctattactaaaggtcaatctgtagtaatgtatgatggagatattgtagtaggtggaggtataatcgagaaaagtttataaaaacatctaaaaaattaaaaaaataagcaataaagtatattaagagtaaataaagtttataaaataaatttattgtatattaaaatatagtattgattaattttgtaaaatttagtaatataattagtatattaattaaaaaacaaatacagtgataaggaatagtaaaatatttgatgtcttacagagagagggaaatgctggaagcccttagaatatgatatttgaagcagccttttagtagcaatcttgaacaatttatcttttataaagaagatttaagtagagattgacggtagttacgttatagctaaggttttccgaagatatcatactttgtatgataattagggtggtaccgcgattgtcctcgcccctataaatttatttatagggacgaggttttttatttaaacgaaaaaataaaatttattaggaggaacatgatatggaaaagatgggattaaatgaaataagaagtaagtttttagaattttttgagtcaaaaggtcattatgtagcaaatagttattctttagtaccaaacaatgataagagtttgttacttataaactcaggtatggcacctttgaaaaactacttttcaggtgtagaagtacctccaagtgtgagaatgtgtacatctcaaaaatgtataagaacaggagatatagaaaatgtaggtataactgcaagacatgctacattctttgaaatgatgggtaacttctcatttggagattactttaaaagagagtcaatcaaatggggatgggaatttgttacagaatggctaaatataccagaagataagatatgggtgactgtatatgaagaagatgatgattcttatgatatatgggcaaaagaaatgaatttcccagaagaaagaatggttagacttggaaaagatgataatttctgggaaataggtacaggtccttgtggtccttgttcagaaatatattttgatagaggagaagaatatggatgtgacaatccagactgtaaaccaggctgtgattgtgataggtatttagaattttggaaccatgtatttactcaatttgatagagatgaagaaggaaattatagtctattagaaaacaagaatatagatacaggtatgggtcttgaaagaatgggatgtattatgcaaggcgtagacactatctttgaagttgatacaattaaatctatactagaagcagttgagaagttaacaggagtaaaatatggagagaatccaaaaaatgatatatcaataagaataataactgaccacataagagctgtaacattcttagttagtgatggagtgcttccatcaaatgaaggaagaggatatgttcttagaagactccttagacgtgctgctcgtcatggtaagttattaggagtaaaagaattatttttacagaaactaatagatgaagttataaaggtaaatgataaagcatatccagttttagttgaaaaagaaagttatattaaaaaagtagttggaatagaagaagaaaaattcaatgaaactatagaccaaggaacagaaatattgaactcttatatagaagtattaaaaaatgaaggaaagactgtcctaagtggtcaagaagcttttaaactatatgatacttatggcttccctatagacttaactaaagaaatattagaagaagaacatctatctgtagatgaagaagcttttaatgaagaaatggaaaagcaaaaagaaagagctagaaatgctagaggaaatatggatggagaaagttggaaggaagaccctctatcaaaattagaatctacagttgacagtacatttaatgggtatagtgaaatttatggtgaaggaactattgaagctatagttaaagatgatgagctagttcaaagtgcagaagaaggcgataaggtatctatagtactagataacactactttctatcctgaaggtggaggacaagttggagattgtggattgataactaatgaaaacttagttttagaagtattaaatactaaaaaaggtgctaataatagtataaaacatataggtataataaaatcaggaagaataagtaatggggacaaagtaaagacactcgtagatagagaaactagaatgtcagctgcaagaaatcacagtgctacacatttacttcataaggcattaagagaagtattaggagaacatgttaatcaagctggttctttagtaactccagaaagacttagatttgatattactcactttgaagcgatatcaaatgaagaattaaaagtaatagaagaaaaagtaaataatgttattttatcatctttagacataaaatgtgatattatgaatataaaggaagctaaagaaaaaggagctacagcactatttggtgaaaaatatggtgatgaggtaagagtagtttctatgggagattattctacagaactttgtggaggaactcacttgacaaatacttctcaagtaggaatgttcaaaatattatctgaaggtggagtagcagcaggtgtaagaagaatagaagcaataacaggaaaagctgtttatgaatacctaaaagaaagagatggaattatctctgaagtttgtgtaaacttaaaatctaaagaagataatttaattcaaagaataagttctttattagaagaaaataaaaacttatctaaagaattgcatgatatgaaagctaagatgagtttacaatcagttgattctatttttgattctaaagttgaagtaaatggagttaatttgataactaataaatttgaaggtatggatatggatacactaagagaaacagcagataatctaagagataagcttggttctggtgtagtagtacttgcaaatgtagtagatgataaagttaactttgtagttactgccactaaagatgtattagataagggaatacattcaggtaatattgttagagaagttgcaaaaatagctggaggaaaaggtggaggaagacctaatatggcacaagcaggagctagtgatgtatctaaggttgaccaagctttaagctatgcaagtgaggttattaagacacaagttaaataacattcactcaaggaggtttttagtttggaaaaagatttagactacactatgaaatttgaaggaataccagaagataggatgagtgtaggagatactattgattttgtatataaagcattagttgaaaaaggatataaccctataaatcaaattatagggtatctcctttctggtgattctagctatataactagtcataaaaatgcaagagctataattaaaaaatttgaaagagatgagatacttgaagaagtaatcacgcactatctgaatagaaagtaggtcaaataaatgagaaaaaagattatgtcgttgtttgcaatagtcattatgatttttgtatcaactgctagctatggttttgctgaagaaaaaggcaaggtcatatttattgatatgaataggaccaatcttggaagtatgatgaatattccaatcttgaaaaatgagatagaaaagagaggctatgtagctctcatgaatataagaggggatcaaggtactgatgatagaaggtcttatgcaagtatgggtgcaggaacaagagctagtgtaactactgaagactatatcaattttcaaaaagtagaccaagatactgctaaagcttttgaagtcgcaacaggtcaaaaagctaaagaaataaatgatttaggcattaatagatctataaatgaaaatcttgagtatggagaatatggagcaaatttagggtcattaggaaaaactttatcagaaaatggtttaaagacatctgtaattggaaatgctgatataattgaaaataatcaattagttaaaaatagaaacttatgtttagtagctatggaccaatatggaaggattgattcaggtaatattgataatattaataagaaagattctaaaatgccatttggaatatctacagactacgataaattactagatgaaactaaaaaatcctataaaaatagtgatgctatatttgtagaacttggagatacatatagattagatatgtatagattaaatctaaatgataatacttatggtacaatgaagaaaaatattgtaaaaaatataaataaatatcttgaacaagtattttctatggttggagaaaatgacactgtttatatagcaagtgcatttccaagtgacctagattataagaataagagaagactttctccaataataaaatttagtggagaagggaaaggtctactggaatctgccacaacaagaaaggctggaattgttgccaatttagatgttggagtagatatactaggtacatttggtcttgaaaataaagagatggtaggtagaagttatactttagtaaataaagaggacaatgttggctatctaaaatcactttatgaaaggatagtgtctatatcttcaataaggtcaactattataaatggctttgtaggcgtaatatctgcttcttgggtaattgccatgtttgcgattttctttagaaattatatgccacataaagagcgtgtattcaaagtacttaaggagtttataaaattaggcataataatgccactatcatttatgttagctcctttgatgaattttaaaactccaatttcaatatctttgggaatatttgcgactacgctaatattatacttgttaggtagaaaattatttaaggacaatgatataaagcacatgggattttttgcaacacttactattttagtcatagttatagattctgtatttggaacatacttaatgcaaaataacataatgagttatgatgctgtcataggagctaggtactatggtgtaggaaatgaatatgaaggtgtaactatagcaagtgcagtatttggcttagcagtattattacattataagaaggtatctaaattacttgttgtaattttttcgttaataatacttataactagtgcatatccttcaatgggtgcaaatgttggtggagctatatcagaatgtgtagcatatttgttgtttataatgcttatatatgacattaaaatagattttaagaaagctgtattattagctgtttcagctgtagttgtcgtttttgcatttgcagctttagatatactttcaggtagtgaatctcatttaggtatgtttgtacagagaattttcctaaatggaccaggagagatattacaaacatttggaagaaaaattcaaatgaatatgcaactagcacagacaagtgtatgggtaaatattttacttgtaggaattggagtaattgcagtacttatatttaaaccatctagacactttagaaagataatgaataattttccaatcttgtttaaagggtttattgcatctatggttggttgtataattactcttttagttaatgattctggaatagttgctgcatctacagcatctatatatatacttataccactaataataataaatataaatatgataatatttgaaaaaaacaactaaaaaattttttactgttcatataggatttaaataaaaaatgcaatatgattattaatgtaaactggatgcttacataaaaaatcatattgcaatttttatgattgattatgcaaaattctatgaagcaggaagcctgtgaccttagttatgagaggttcagaatatgtatttaatctatagaatataaatagataaaggaggaactatgttagatggaagaataatgggtcttgatgttggtgataaaactattggagttgctgtgagtgatttgatgggattaactgcacaaggtgtaaaaacaataaaaagagttggcaagaaaaaagatattgaagagttaaaagcaataataaaagaaaaacaagtaaataaaattgtatcaggattaccaaaaaatatgaatggaactttaggtccacaaggagaaaaagtaatcaagttttgtgaattggtaaaagcagaaacaggtattgatgtagagttttgggatgagaggctttctacagtagcggcagagaggtctttattagaagcagatgttagtagacaaaaaagaaaaaaggttatagatatgttggcagcagtaataattttgcaaggatatttagattttaaaataaattcataaaagaactataaaattgaatacttatgatatataatataaataataaaaataaaaataaatttgaggtgaatgacattatggaagaaaatataataaatttaatagacgaaaatggcgttgaaagccaatttgaaataatattaacattagaagcagaaggaaaagagtatgcaatattaatgcctttagatgatgaagaagctgaagaagctttaatctttagaattgatgaggatgaagaaggtgaaatattaatacctttggaaagtgatgaagagtatgaaactgttgtagctgtgtatactgctataatggaagaagaaggtttaaattacgacgaagatgaatcaaatggacttaactagataagtaattaagtttgtatataaaaatcagatatttattatatttgctttaattaaaccttattaattgtaaaagcatttatagtatatatctgtttttttgttttttattaaaaataccaaaaaatttatgaattttggtgaataatatatcttttatgggtatatatttatattatgagaataaattaaatttatttaaatgtcttgacaaaaaatgaattatcaattacaatattatttaataaagattatcaattgaaaatagtaagggtgatgttatggcaaatacaatggatttattaaaagacaagttaaaagaaactggttttaagattacgccacaaagaagagcaatagttgaaatattgcttaaacatgaccattcacatctaagtagtgaggaaatctatgatttagttagggttgactgtcctgaaataggcttagctactgtatatagaacaatgcagctattggatgaaataggattaatatcaaaactaaacttagacgatggatgtataagatatgagattagtctacataaagaagactgtcataatcatcatcatcttatttgtaaaaattgtggaaagataatggaagctaaagaagaccttttagacaatatagaaaaagagatacaatcattgtacaaatttaaaatacttgatcatgatgttaaattttatggattatgtgacgagtgtaatggagtaagcgattcagaagaataaacttctattgcttaatgtcgatggaagaatagtatagaacttttatattctatgctattcttccattttttattataaaccatctacaaaatgcaaatatacagttttcaagatgcttatagttttaatattgaaaatataattaatcctataagtacaaaaatgaatgatttttctatgaaattactaaatggtcctccaacagttaaaaaacctaaagaaattttcttttcgcttagcggataaaaaattggtattccttgctttgtaaataaatctcctaaaaacatatgacttgcataaccaatcgtaccataaaaagataaattattaatattagtgattaattctatctgttttagtaaaaaatatactattatagttgcaaatatgctatgagaaaaacttctgtgctttaaccagggaaaaattgacaacattagacaaaaaattgtaaaatatatttcaacttctatgatgtataagcatatagctaatagtataaatattaatgatagaaaaacttttcttagaaatgtgtgggttagttttgcttcaataattataattgcaacaaatgtaattattgcgcttaaataaaaattatcatttatatttattgaaataaagaaaataataatattaacagcatatataaaaattctatatatgtatttggatacattgttttttagaatgaaatttgagaccatagaattagatttatccaaatcgggtagtacagcaaaagtagctgaaactaaaatatcaactaaagatataggaattttaaatattaaagatgtttggatagctgttaagattcctattgcacaatgagttttaccacgcataaatcctcctaaattatccgatattaaatcatataatatttagaggatatcaaaataaaataggtttgtcaaaataatacgttaaatgtattttaaatatagcttaaaatatgatacgaattatggtacaataagaataactggtagcgagtgcgtgatttgatattatttatgattgtagaacgtgttaaaaaattaaatagacagaaggagatgatgcaattgttcaaaaagaacaccaacaagataaaggtaatggccttgggtggacttaacgaagttggaaaaaatatgactgttgttgagtataaagatgaaataattgttatagatgctggacttagttttccagaggatgaaatgttaggagtagatatagttataccagatataacttatttagtaaaaaatagggataaaataaagggtatatttattacacatggacatgaagaccatataggagctcttccatatatattaaagaaaataaatgtacctgtatatggggcaagacttagtataggtcttatacaagtaaaacttaaagaacataaaatgaataatgttaagttaaatgttataggtcctagacaagttataaagcttgataatatggaagtagagtttttgaaaaataaccatagtataccagatgcttactctattgcaatacacacagaccaaggtataatataccacacaggagattttaagattgacttgactcctattgatggagatgttatggatatgcatagaatctgtgagttgagcaaaaaaggagttcttttaatgctggcagatagtactaatgcagaaaaaccaggatttactatgtctgaaaagactgttggggtaggtcttgacgaattatttgcaaaaggaaatggcagaagaattatagttgctacctttgcatccaacatacacagattacaacaaataataaatactgctgaaaagtttaatagaaaagttgctatatcaggtcgctcaatggtcaatgtagtcggagttgcaaaagaattaggatacctagatatttctgatgacatgcttatagatttaaatgatatatgtaagtatgaagatagtgaattagtgataataacaactggttcacaaggtgaacctatgtcagctcttgctagaatggctttttcagagcacaaaaaagtagaaataaagagtggcgatttagttataatatctgctcatccaataccaggaaatgaaaaattaatatcaagagtaatcaatttcttatttgaaaaaggagcagaagtagtatacagtgatatagctgatatacacgtttctggacatgcctgtcaagaagaattaaaacttatacatgcattagttagaccaaagttttttatgccagctcatggtgaatatagaatgttaaaaagacatgctgaaatagctgaacagcttggtatggataaagaaaatatttttgtcatgcaaacaggagatgttttagaattagataaaaactctgctaaggtagcaaaccgtatacaaacaggaaacatattagttgatggtctaggagtaggcgatgtaggtaatatagttttaagggatagaaagcatttatcagaagatggtcttatgatagttgtagttactatttccaaggatgagggtaaggtcttagcaggtccagatataatttccagaggattcgtatatgtaagagagtcagaagatttaatggatggagcaaaggatataattaagaatgttctaaatgaatgtgaagagaaaaatattaaagaatgggcttatttaaagaataatattaaagaaaacctaaaagaatatttatatcaaaaaactaaacgaaatccaatgatacttcctatcataatggaagtataatataaaaaaactataaatttgaaaattagacctcttgtaatttttaaagtaatatcaaaaatccaattgatattatcttaagaattacaagaggtctttttaatactcatttaaaaaaaatatatattacataaaataccaattataacaatcttttattagtaaaaactacttatatataaattttactgataggaggattcttatggatgatgtttcaagacaaaatgctataaaagctttaaaacaaacaaaaatggaaatagcaggagagtatggaatgaattatgaagatgcttttgaaataatagaaaatgcgtctaataaaggtgttttagaaggttactttaaaaagcttgaaaagaaaaaaaatttaggtcaaggtatatctaggcatttagaataaaaaaagttaaatgtgagaaaataagtttaaataaactttaagaggtgacatcgatgaaaaaattagctagtactgctttggctatattaattgcgcttactcctttaagcttttcttttgcaaataataaggaaaatgctgatgccaaccaactaaatatatcttcaaaatcagcaattttgatggatgttggtagtggacaaattttatatgaaaaggatgctcataaaaagcttcctcctgctagtgtaactaaggtaatgactatgctacttatagtagaagctttggattcaggcaagattaagcttgatgatgaagttcaagtaagtgaaactgcatctagtatgggtggtagtcaaatattcctagagccaggagaaactcaaaaggttgatacattattaaaaggtatagctgttgcttctgcaaatgatgcttgtgttgctatggctgaacacttagctggaagtgttgaaggatttgttgatagaatgaatgctaaagcaaaagagttaaatatgaatgatactcattttgcaaatacaaatggacttccagttgcaaaccactatacatctgctcatgatatagctttaatgtctagagaactattaaaacacgaaatgataagtaaatacttaactacatggatggataaggttgtagtagggaagaaacaagttacagtaggtcttgcaaatactaataaacttataaagcattatcaaggagcaactggtgttaaaactggttttactcaagaagcaaaatactgtttatcagcatctgcaaagagaggtaatactcatctagttgctgcaactttaggagcagagacttctccagaaagatttaatgatgcctctagccttttaaactatggatttgctaattatgaaagtgttaagttatgtagtaaaggtgataatatagcaacacttacattggataaggctgatgaaaacaaagttaaattggttgctaaagaagatttaaatgctcttattaaaaaaggaagctctaaagaatttgagaagaaaattgaaatagtaaaaaatcctaagatgccaattaaaaagggaactgttttaggaaaaataaagatatgtaaagataaaaaagtaataggcgaagtggaattgataaatactaaggatataaataaggcaagctatctacaaatgcttcaaagaataattgataatatgatataaataattatcagatgaaatataattataatacacaaagatatgattataatacacataaaaaatacccttatgtagttatttgccataggggtatttttatttaccatatagaagtattttataatcttatgatttttatagaaatatagaaaagtttatgtatcttaaaatatcatttgatttaatatcatatatagggttgtttaacaattatctaagtaaaggcatactaccagtaagtttattcactttctttttattcccataaattgctatcccaaaatactgtaactcatcttctggaacactagcaatcttttgtgtaaattcttcataaagattgcaactttgtgctacatctgaaaaatctacaacagttaaatcgttaaattccaaagtatataattttttacgtaaatcttttattatttctttgtttccttttaaaataggtacaggaatgtcaataattcctaagtggctattacctgttttgtcaattacatctggcccaacagtttctggggcatgttttcctagtgtaattcccattatagctgctgtattggatataattcccattggtaaattttcgtctattaccatgacacattttgaatttttattttccatttttatttctcctttttaccttatttaaagttgtttgaatcatcatttataaatatattttgatactgctttggtgtaagaccaataaaattcttaaaaaagtttgtaaagtgactttggtctacaaatcctgtttgtatcgcagcatctataggttctacgcctttttctaaaagctttttagctttgtttacccgtatattttctaggtatctatatggtgtaataccttttaatttcgtaaaattacgaagtagagagtacttattcatacctgctatagtgcttaattcgtcaagtactatatgttcagcataattattttctagataatcacatactgcttgaatttctatatttgtattttccaagttagattgcaaatttggctctgtatgttcttcaattaattgctcaattaggaagaaaaaaagctcttcctttttaaaatccaattcttcttccatgattatatagtgtaattcttgtagtagaggtactagctcactgcgaaatataacaggttgattaaattttggtaaataatttttacctgtaatttcaaagacggtttttttcattatttctggcttaatattgatacatctgtaatcaagtactttatcatctatttgttcacaagtatgactgtcaaaagggttaaaaagtagcaaatctccagtacttgtggtatactctttatttttacaagataaatatctttgacctttttctataaaaccaattacataatgttcatgaaaatggtttgggaatttttgcattatgcctttaaatctatatgcttcaatttttaattccctatcaaagcatactgtgcgttcttcttgtctcacttaggtaacctcctttcatgttatacaaagtgtaacacatatttttttatacttcttgtataatattgactaagagacaataatgtcaattcatgtcaatataatattacacttacagtaggtgtaattattatattttcacaatgaatatgatataataataaaagttataaaataaaaagcaaattttaattttatgcctagaagttaaaattattataatgtaaaataattttgattataagctatttaattgttataataatattaaaaatttaatttaggagatgtacattaatgttaagtatgaatataggagaaatagtagcaagtttagttggtatagctatggcaatatcaatacatgagtttggccatgcttattcagctcacttattgggagatgatacagctaaagcttatggtagaatgacattaaatcctgtaagacatgttgatccaataggtcttttggctatgtttatccttaagatagggtgggcaaagccagtaccagtaaatccaaataattttaaaaactataagataggaaacctgatagtttcacttgcaggcgttttttgtaatgttttgactgctatactgtgtgtaattatcaataagtatgtgcatatgtatgctataaatacaatagctggatatgtgcttatatatagtatgggatttgcagcttttaacttacttccgatacctccacttgatggatggggagttatatctacatttgtaccatataaatggaatgaatatttgtataaatttgaaagtatgagttatataattttattaattgctttatttactggtatatatcaaataatactatcaccaatatatacagtgttgctaaaaatagtatatttatttgtttaatataataaacagattaaagagggattgatatgaagtataatatacaattacaagtctatgagggaccattagatttactttatgatttaataacaaagcataaaatagatataaaggatatatctataatagatataactaagcagtatctaaattatttgaaaatgctagataaaatggatttagagataactagtgaatttataactatggcatcaaaacttttagagataaagtctaaatatctgctttataagcaaaaagatgaagaagaagacccaagaatagaacttatggaaaagttagaagaatatagaaagtttaaggtagcatcacaagatataaaagaaaatataacttatgttaatgagagattttatagaaataaagaagagataattattgatgacaatgtggatttagaagatatatcaattgaagcaataaaaaatatacttccatacatatttaaagttaaaacatcacagatagaaaatgctaatgatgagaaactagacaaaatagtaaggaagaagataatatctgtggaagaaaagatattgtatataagagatattataaaagataagattgaagttacttttacaaatattataaaatcatatgaaaatgatgaaataatagctacttttttatctatattagagcttataaaagaaaaagaaatagtagtagtacaagacatattttttgatgatattctaataagaaaaagttcggagtgttaaaatgaaaagagaagatataaagtatattatagaatctgttatgtttgcatatggggaaccaataagtataaaagaattaaactatataataaataaagaactttcatcaaaagaaatagagattatgttaaatttacttattgaggagtacagagaacaaaatagaggtattcaaataatcaagctagagaataagtaccaaatgtgtacaaataaagactatgcagaatatataaagaagattattgaaccaaagaaaaagaaaagtttgagccaagctacattagaaactcttactataattgcctacaaacaaccaataacaaaggtagaaatagaggatataagaggagtaaaatgtgataaggtattacaaactttgtttgaaaatgaacttataagagaagctggtagattgaataagatagggaaaccaataatttataaaacaacagatgaatttttaaagttgttgaatatagaaagtcttgaagaattgccgcctatagaaaattatcaagaagtggcaacaaatgaataaaaatataaaatcacaataatttagtatgtaattttaaattttaaaagatttaaaatgctctaagttgttgtgtttttttgtataaatataaaattataattctcttaaaataaatatggataattaagtataaatagtaattttttgatgataatataaacatggagcttaatgaattatttaattttaagtatttaataatagctgtaatttttattataagtgtaactatgttgattttaatatctcatataaacatcttaataatagctgatataaacaacaaagatatttgtttaaagcttaatataaaatacatgtttaatttaataaatataaatagacaactttatccagctgaaaatagtaaaaataatgataaaaaagaggggatgaagaataatatagattcaagtatattattagctgatgaccttttgagcatttatagattattaaaaaagataaaaatacatgaactttattcaaatattaattttggaactggaaatattggcttaacatcttctgtatatgtattgataaatactttgtatggaaatttatttaatatgattgatgcagaaaaaatgtatttaaatgtaaatccagattttacaaaagattatgttttaggaaatataaggatacatataaggccaagaataaaagctttatttaatattataataatgattaataaaattatgaataaaaataaaggaaataaggaaggtgatagtaatgagagcaacaggttcgatacaaagtcttatggaaacaactcttgaaacaattaaaggttctatagatgcaaatactattataggagaccctataaaaacagatactacagtggttgtacctatatcaaaggttacaattggctttggtataggaggaggagaatactcaaaaggatatgatgataaagatagggaaattgaattaaaaaatgaaaaatcagatacgaattttgctggaggtagcgcaggggctatatctgtacaaccagtagcatttgtagtagttgaaagtggagagactagaataatgagtttagacagtaatatcaatctagtggataatatattatctataactcctagagtattggagaaaattcaaaatatatcacaaagtaataagaatcaagataaaaacaatatgtaagaataaaatatttttaaatatgtatatagttttaagtaaagtagtggggttagtataaatcccactattttgttgtgtactttaaacatttatatctaataagattttagtttaaaacaatttaaatagataataaagttgatatatagtataattataaaaagaaaagaagtattatattatagatatataaacgcatttgagatataagagggagttataaatcattagttttgaggtgaatgttatgagcgataaagaattatctattttgttgttagaaagtatgaataattttcataatttaataaagattattaataacgaaagatataaaaaagataaggttcttacagaaagacagttctttgccttagtaaaaataagaaaacatgataaaatagagcttaaaaatctaagtagagatttacatgtatctacttctagtctgtgtatactacttaataaattggttgagcaagagtatgtatatagggaagaagatagtagagatagacgaaatactttttatggaataactaaaaatggagaaaagatattggataatgaaatactaaagtttgtatctataataagtgataaaatggattgcttagatatagataataaagataaattatttacttctttggaagagtctaaaaatataatagaacaattattttaaaaaggagaatttattatgaatataaagtattctaaagagatattaaaaagtttagaaaatgctataacagtagtagctctatttgagggagaagatgtttctacgacatttgataaaataaatatgataagcagaaattttaattctaaagaaaatagtatagatactgtaacattggttgaaaataacaacttggtaaatgtttgtcttgttggttttggtaagagagagttattgaatagagaaaaaattagaatcataggtggtaatttgtgtaaaaaattaaaaaatatattgaaaaatgaagcatataagagtagtgatgttaatgtacttaatcttaatttaaatagtgatgaaataggttcttttgtagaagggatattacttggaaattataagtttgataagtataagacaaaaagtaaggattttgaaagaaaagaagttgatactataactatatttactgaaaaagaagttgagtgtcaaatagaaaaggctaaaatattagctaattcaactataatagctagaaatctagttaatgaaccatcaaacgtaatatatccaaaaacattagcaatagaaacagttaaacttggtgcagagttcgggtttaatgttgatgtttatgaagaagaaaaaataaaggcattgggaatggatgcttttttcgccgtttcaagaggttcaatcaataaaccaagattcatagtaatgagatactttggagataaagaaagtacagatatattaggtctagtaggtaaaggattgacttatgatactggtggatattctttaaaatcaaatgcttctatgctagatatgaagacagatatggctggtgctgcgagtgttataggtgctatgtgtgctatatctcaaagtaaattaaagaaaaatgttatagcagtagtggctgcatgtgagaatgctttatcaggaggttcatacaaacctggagatataattagttctatggcaaagaaaactattgaagttttaaatacggatgccgaaggtagacttacattagctgatgcaatatactacattataaacaatgaaaaagtaacaaaggtagttgatgtagctacattaactggtgctgctttaacattgttaggaaatgttgcaactcctatagtaacaaataatgatgatttttattgtgaattagaaaaagctgccactttatcaggagaaagggtatggaagatgccaatttatgatgaatttaaagatatgataaaaggagaagaagcagaccttaaaaacactggtggtaaaaatgctggatgtataacagcaggagcttttattggtgaatttgttgggaatactccttggatacatatggatatagcggggacaagtacatcatcaaaatcaattggatacaaagcaaagggggctacaggagaacctgttagaacattatactatttggcagaaatctaaaaaacaattataaaatataatttataaagccacatggatatttttgtaatttaagattatctatgtggctttattttttatttaagtaaattatttactctttttctttttctcaagtataaaagtatctctattaaataaaagagcaggtatgtacataatactagtaacaaaaataaacgtaaaaatagcagttgtgctatgacttaaaaaaccataatagtattgtgagttggtaaatgtgtttagtaaaaatatgaatgaaaaataaataaaacatatagctaagttatctctaagtgcatatctgttaactctaaattttctaacatcaaccatatatatatctgcataaattatcaagcacttagagaagataaatataaaatatattaagctaggaaattcatagcccaagtttttagaaaaaatgagttctccaactgaacaaactaaactccaagaaaaaaatatattaaaaagatgatactgcttaaaaattagtatggctatacacagatatatacagatataattgattccaattggtaaagagtttagagtactataattacctgaagaaataagtaataattgctctagagccataattattacaagtaatgtacaaattatcttctcaactgtatagctataaggtaaaatatttttggttagttttggacaatagtataaaaataatccaaatataaagagacttacaaattgttcactagaaaaaagaaaaattttaaacatataacattctctcctataataaatttaatatgtatctatataaatatattcattatatctcaatttaatatataaaaaagataataatagttagactttttatatgaattttaataggtaaaatatcctattgttttgtagatatatcctaattatgtcaaaaaataaaaaaatttttatttattagagtttttggaaataataataacagatattataattaattaacagtttttgtaagtatttgacaatagagagggtgtaacaaatgggaataatagagtcagcatcaaaattggctgagatggttcatttattggctgttgaaaaggggataactgatatagaagcatgggatgaagctgtgaaagaatacagcaaaatttatgaagaaagaagaaatgaatagaatgataaaaaatgaaaacttgatgataaaaaataactttatttaaagaaattcaatttttatagaaatattaaaaataatataaataaaaagatggtatttcaaatgtaagtaaaaaatcattttgggataccatccttattatttattttaataatatataagtaataaatcttacttatccatattttttatgtaacctcttttttctagcttttttatatgctccttacgtatttcatcaagattaataccatattgttcttctagcttaaacatcatagtaacacatgtctgagctacatccattagttccttagcagttttctttataatatcaacttcatctaaatcattattttctccacttagatttctgaatttacctatacattcagctaattcaccttgttcttcacccattttgataaatgtagattctagtgttgggtctaaattattaagctctggtaaagatatagtttttagtttcataaaagctcctttcaagttattcgtatttatactaaaacatcataacaaaaataatactaaaaaaaaactttaaattcaacataaaaacttacatatataataaaaatcgtgaaataaatctatatttgtcttaatacagcctcatataaaacttctccaataggtttatttattacaagagaagctgacttatcatagactgtatttgctttattaataagagcaatataatcacctttgtaataatctataaaacttgctgctgggtacacagctaatgatgtacctcctataatcaataaatcagcattacttatagcagaaattgttttagtaatgacatcactgtcaagagcttcctcataaagtactacatctggttttactatagaaccacagttgtcacaataaggaatattacctcccagatttaacatagattctaagtcaaaaaacttaccacatttagtacaataatttctatgtacagaaccatgaagttctagcacatttttacttccagccatttgatgaagtccatcaatattttgagttatgacagctttaagcttacccatttcctcgagttttgctaaagctatatgagcattgttgggttttgcattaggatatattaatttatccttataaaattcaaaaaattcttctggatatctaacaaaaaaagtatgtgaaactaattgttcagcagtaaattgtttattgagtttttggctaaataatccagtagaacttctaaagtctggaatattagattcagttgaaacacctgctccaccaaaaaatacaatattattgtgattagctattaagtcttttaagctatttgcatccatagttacacctccaaattattatatataaattgtactacatattaggtcttttatgttttattaatttaaataaatatgtagtttaataagttaaataaagggaatataaataaaatgtatacagagtataaatagacaatatttactaaaataacaagttgtcgtataattatattaaaattgttttagtgtataagaagggcgggggaagtacgtgaagaaaaaagcagctttagcaacattggctatgttacccttaggtgtggtaaatgcacatgctgatggagatataggtatagtgactataaattatttaaatgtaagaaatgagccaactgccgaaagtagcatagcctttgttgctaaaaaagatgataaagttttgattaaagactcttctaatggatggtataaaataaaagctgaatctggacaagaaggttgggcttcatcaaaatatatagcaaaatcaaatagtgactctttaagaacgtctacaaataaagaaaaacaagttatttcaaatagtttaaatatgagaaatggagcaggtacaagttacagagtaataactgtactaaaaaaaggtcaaaaagtagaagtaatatcagagagtaatggatggtctaaaatcaaatatgatggaagactaggatatgtatctagctcttatttaggagacgtttcaaattcaactaataaatcaaaaactaaacaagtgaatacaacttcactaaatgtaaggagtggaccaaatacaagttatggtttgttaggcaagttgccaaaaggaagtaaagtagaagtaatatcagaaagtaatggatggtccaaaataaagtataatggaaaagatgcctatatatctagtatgtacttatcggatgtaagtcaaagtaattcagacaattctagtcaaagcaatgataaaaagaatactgataaggttgtaaatacagcttctttaaatgtaagaagtggaccaggttctacatatagtaagttgggaaaagtttataaaggaagtaaagtaactgtactatcagaaagtagtggatgggctaagattaattttaacaataaagaagcatttgtagtaggcaattatttatctacttcagcagatacttcaaataataactcaaatagtaactctgataacagttctaatagtaatggcaataattcttcatcatcaggtcaagtaaatggtatgtcaggtataagtggggctaaaattgattataaatctttgagttatactttagaatctcatataagtaaacaagttgagaaagcagcatcaggaggaaatgtgatagctccaagtaataggaaaagcactccaagtcctgaatttagtactttttcagctcaaagaacaagctcatttgtaaatgcaagttcaagtgatatagaatattatttaaatcctaaaaattttacaaatactactaaaggtatgatgcagtttttaaagattaacagttatagagatggtatttcagaatcaagtcttaactcgtatcttaatggtttatcttctagtgtatttaaaaaccagggagcagcctttataaatgctgccaagaagtataatatagatgttgtatatctagtatctcatgctatgtgggaaactgcttatggtaagtctacacttgcccaaggtcaaacattaacatcttataagggacaacctcttagtaagccagttaaagtatacaatttttttggtataggagcaatagataaaagtgctaatgtttcaggtgcagaagcagcgtattccaatggctggactagtgtagaagctacaatagatggctctgcaaagtggatatcacaaaattacgtaaatagttctaagtacaatcagaatactatctacaagatgaagtggaattatgattatacatggcatcagtatgcaactgatgtaaactgggctaatggaatttctggaattatggaaaatttaattggtctttatggaggaggaagtagtttggtttttgaagttcctcaatataagtaatacataaataaaaaatatagactatgggtagttttcattttatttaaattatctatagtctttttgtatataatttataatctgtaaatttaatgttaacaaaacttttatgttataatattaattctaagtaaatataagtgagtaataggtagaaatagataaaaagtggtaataatatatataaagataattttgagaaaggaggatatatatggaaagtattaaggaatatttggataagttagaaattaataatagtggtcttggaaagcaacttaaagaagtttatataaatagagtagtttattttaaggaagataagatagtttatttttatctaacttctaaagatattgtttctcatgaacttttagataaatttaaagaagaattgatgtataaactcgattattttaaagatatgaggatgaagataagatttactggtcttgaaagaaaatccaataaagatgttataaaaaaatattggaataatatattgtatatattaaagtatctttgtccatctattgcagggtggtataaacaagtagaatttctttgtttagaagaagaattaaaaataaaacttccaaaaggtatattttatgagcgattaatgaaaaaaaatgtaacttatgtacttaaaaccgtgcttagcgaagagttgggattagatttaaatataacaatagaaaaagctgttgatgaaaaggtaaataaagaaagactcataagaatcaatgatagagaaatggaagaaaaaattagggctttagaaattggaaaagttaataactgtgaagaaaatgaagaggaaagctatgtcattaagtctgatgtagatgaaaatttaatctatggagataatgcaaatgctatgattgaaaatatagttgaattaaatgcatcttctggaacagttgcagttgttggagatatatttgatgttgacactaaagaacttaaaaacggaaaaatacttatgatagcttcaattacagattatactagctcaataagctgtaaactttttttaacagatacaaataaggatggagtacttgaaaatgttaaaaagggagcatacttaaaaatcaagggtgacatagtttatgatacatatcaaagagaaattagtatgatgattagtgggataagaaaagaaactagaatagagagagaagataaatcagaggaaaaaagggtagaactccatgcacatacacaaatgtcttctatggatgctatttgttctgttaaaaagcttgtagagcgtgcagccaaatggggtcattctgctattgctataacagaccatggtgttgtacaaggatttccagatgctatgaatgcaggtaagtcaaataatataaaaatactttatggagtagaagggtacttggttgaagatgattctctcattatagaggatgcaaatgataaagaactttcgcagacatttgttgtatttgacatagagacaactggtttttctaatacaaatgataaaataactgagattggtgctgtaaaaatagaaaactttaagattgtagatagatttagtgagttaataaatcctgaaaaagatatttcctataagatacaggaattgacaggaataactaatgaattaattaaagacaagccaaccattgaagaaattcttcctaagtttatggaatttgttggagatagtgtattagtagcacataatgcagagtttgataccggatttatatcgcaaaaatgtagggaacaaggcttgttatataataacaaaaaagtagatacacttatgttagcaagagtaatgttgccaaacttaaaaagacatagattaaatgtcgttgcaaaagaacttggtattcctcttttaaatcaccatagagcagtggatgatgctgaggctacagcacttatatttaataagtttttgcagatgcttacagaaaaaggtgcaaaaactctaagtgatgtaaacaatatacttggaaagattgattacacaaagcttagcacaaatcatataaccttgatagcaaaaaattctataggtataaaaaatttatataaaataatttcagatgcacatgtaaatcatttttttagagcaccaagaatccttagaagtgtattaaatgaatataaagaaggattaataattggttcggcttgtgaagctggggtggtttttcaagctgtaaagaaaaacgtgtctgatgaggaaatgaaaaaaataatagatttatacgattatattgaagtaatgcctatagataataatagatttatgattgataaaggagaagtaaaggatgaagaagagttaagggagttgaataggaaattaattgatacagccaaaaaatttgacaaaattccagtagctactggggatgttcattttttagacaaacatgaagctgtcttaagaaaagttcttaaatattctcaaggttttaaagtagatgaagaagaaacttatttacattttagaacaacagatgaaatgttggaagagtttagttatcttggagaagaattggcatatgaagttgtagttgaaaatagtaatctgattgccgatatggttgaagatataaaacctataccagatgatacttatcctccaattatagagggctcagatgtggagttaagagaaatgtgttacaaaaaagccaaacgaatctatggagacccaataccagaaatagttcaaaaaagactggatagagaattaaattcaataataagcaatgggtatgcagttatgtatattatagctcaaaaactggttgcaaaatctctttcagatggatatttagttggttcaagaggctcagttggctcatcttttgcagctactatgagtgatataacagaagttaatcctcttccagcacattatatttgtgaaaacgaagactgtaaatattcattcttttatgaaataggtgaatggggctcaggtgttgatttaccagacaaggattgtccaaagtgtggaagaaaacttgctaaaaacggtcatgatattccatttgaggttttcttaggttttgaaggtgataaggaaccagatatagacttaaatttctcaggaaattatcagccaacaattcataaatacacagaagaactatttggagaggggtatgtatatagggctgggactataggtactgtagcagaaaaaacagcttttggatacgcaagaaaatatgtggaagaaaataatataagtgtaccaaatgcagaagtacttaggctttcaaatggatgtactggagtaaaaagaacctcaggacaacatcctggtggagttatggttataccagactataaagatgtatacgattttacacctatacagtatccagcaaatgatacttcttgtggtgttataactactcactttgattatcattcaataagtggtagaatacttaaacttgatatacttggacacgacggtcctaccattataaggatgcttgaagatatgactggaataaatataacagaaattcctttagatgataaagagactatgtctctatttacatctacagaagcattaggtgttacaccagaagaaataaactgtcctataggttgccttgctgtaccagagtttggaactaagtttgtacgacagatgttacttgacaccaaacccactacatttgcagaacttgtgcgtatatctggtctctctcatgggacagatgtttgggtaaataatgcacaagacttagttagagaagatatagttggattaaaagatgttatatctacacgagatgacataatgaactatttaatatttaaaggattacctcccaaaatgagttttacaataatggagagcgtaagaaaaggtaaaggtctaaaaccagaacacattgaagaaatgaaaaaaaataatgttccagaatggtatataggctcatgtaaaaagattaagtacatgttcccaaaagcacatgctgttgcttatgtaatgacatcatttagaattgcatattgtaaagttcactatccagaagcattttatgcgacttattttacgacaaaagttgaggattttgatgcagatttaattgttaaaggattagatgctataaaatcaaaaataaatgaaattgagtcactgggaaatgatgcaaccacaaaagaaaaaggtatgttgaccgttttagaagttgctcttgaaatgtatgctagaggaataaaattattaccagttgatatatataaatcagatgcaactgagtttatagttgtaggagaaaaaacattacttccaccaatggcagcaatacaagggcttggaggaaatgcggctataaacatccaaaatgaaagaaaaaatggtgaatttatatcaaaagaagatttgagaaagagaacaaaaatatcaaaaacggtaatagaaactcttactaatcatggttcacttgagaatatgagtgagagaaatcaattgtcattgttttaagttagcccaaaaagttgcaaataaaagaattttatgatatcatagtatagaaaatagtatactttgcagaaactaagagtgagacagctgttctcactcttttattttaaatatattattaaaaagttggtttatttttattaaatatattttatttaagattatataaactaatcatttacaattgaataggaggaactttaatgaaaaaaaatttagaagctacaattgaggagattgtaactaaaataacggatgaacatggatttgaaatggttgatgttgaatatgtaaaagaagcaggagaatactacttaagagtatacatagataaagaagaaggaatatctttaaatgaatgtgaattagttagtagagaattaagtccaatactagatgaaaaagaccctataaaagaaaattactttttagaggtatcttctccaggacttgatagagcattaaaaaaagacagagattttgttagatatcaaggtagagatgtagatttaaaattatataaaccattaaatggatgtaagcaatttgaaggtgaacttgtaggattaacagaagataataatataaaaatcattgcaaatggtaaggaaatggaatttaatagaaaagatgttgctattgtcagattagcaataaagttttagtggtatattaaatagggaggatataaaaaatgaatcatgaatttatggaagcattagatgaattagtagttgacagaggtatagataaagaaatacttatagatactatagaacaagctcttttaactgcatacaagaaaaactttggttcagcacaaaatgttagagttgaatttgatagagacaagggagatataaaagtattttctcaaagagttgttgttgatgaatcagatttatatgatactttcttagaaatagagttagcggatgctagagagataaaccctaattatgaattaggtgatattatagaacatgaagttacacctaaaaactttggaagaattgcagctcaaacagcaaagcaagtagttgttcaaagaataagggaagctgagagagaaatagtgtataatgaatttatagaaaaagaaaatgaaatagttacaggagaggttgctagagcaaataaaaatgttgtttatgtaaatcttggaagaatagaaggtataatgactcaaagtgaacaaataccatttgagaattataaagcaggtcaaaaaataaaattctatatacttgaagttaaaaagactaacaaaggacctcaaatagttgtatcaagaagtcatccgggtctagtaaagagattgtttgaagaagaagttcctgaaatatatgaaggaatagttcaaataaaatctgtagcaagagaagcagggtcaagaactaaaatggcagtaaaatctatagatgaaaaaatagacccaattggagcttgtgttggaccaaaaggacttagagtaaaaaatatagtggatgaacttggcgatgagaaaatagatataataaaatatagtgaagacccagcagagtttatatcagcagcacttagcccatcaaaagttgttagagtagatatagatgaagatgaaaagtctgccttagtaatcgttccagattatcagttatcgcttgctataggtaaagaaggtcaaaatgcaagactagcagcaaaattgactaactggaaaatagatattaagagcgaatctcaagcagaacaagaaatgttaaatcttgaaaattccaaagaaatagaagctgaggatgttgaagctgaatttatcgaccaagaagagttaggtacttcagaggataattttagtgaagaagagtaaggagggatgattttgaaaaaagtaaaaaaagtgcctcaaagaaaatgcatagcatgtcaagatagagactctaaaaaagagcttataagaatagttaaaaataaagaaggaaaaatatttttagacccaacaggaagagccaatggaagaggagcatatgtatgtaaaagctctgaatgtctaaaaaaagctataaagagtaaagcattaaataaagcttttaaaatagatgttccagatgaagtctatgataatctacttatggagttagaagaatatgaaaaataataaagaaaaagtactttcgttcttagggctcgcaactcgtgcagggaaaatagtgtctggtgatgattcaactttgcttgaccttaaaaaaggaaaagtaaatttgattttaatcgcagaagatgcatcaaataatactaaaaaactttttaaagataaatcaacttttagaaatattccatatctatttttttcaacaaaagaggaaataggatttgcaataggaaaatctccaagagcagttgtaggaataaaagatgaaaatttttctaaaaagataattgaactaatagaaatttaaaataaaatagggggtgatcttgtgtcaaaaacaagagtataccaaatagcagaagaattaaatatatcaaatgaagagcttataaataagttagctgaattagatataaatgtaactgacaaagattcagtattagaaggtgaagagttagaattagcacttgaaatgttaggtgaagatttatctcaagaaaatggaaatgttatagaaatagatggaaagttgacagtacaagtattagcaacgaaattagataaatctccatcagaaataattatgaagcttatgaaaatgggaactatggcaacaataaatcaagagataagttttgagattgctgctttggctgccaaagactatggatttgaattaacagtagctgaaagtgatgatacagaagctttagaaatagaagctttaatggaaattgaagaagataaagaagaggatttaaaacctagaccaccagttgttacagttatgggacatgttgaccatggtaagacatctttactagatgcaataagaaaaactgatgtgatttcaggtgaagctggaggaataactcagcatataggtgcttcagaagttaaaatcaatggacacaaaatagtatttttagatactccaggacatgaggctttcacatcaatgagagcaagaggagcacaagttacagatatagcaatattagtagttgcagcagatgatggtataatgcctcaaacagttgaagctataaaccatgctaaagcagcaggtgtacctttaatagttgctattaataaaatagataaaccaggtgcaaacccagataaggttaaacaggaattagcagaccaaggattattagttgaagactggggtggagaagtaatagcagttccagtatcagctaagaaaaaagaaggaatagatacacttttagaaatggtattattggttgctgaaatggaagagttaagagctaatccaaataaaagagcagtaggaactgttatagaagctgagcttgataaaggaagagggccagttgcaacagtacttgttcaaggtggtactttaacagtaggtgacccaatcgttgcaggtgttgcatgtggtaaagttagagcaatgataaatgcaaaaggtaagagagtaaaaacagcaggaccatctacagcagttgagatattaggtctatcagaagttccacaaggaggagaccaatttgtcgaagttccaactgataagattgctagaagtgtagcagcaagaagacaacaaatagttagagatgaaatgttaaaatcaactcaaagattatcactagatgctctatttagtcaaatgagtgaaggttctataaaagaccttaatatagttataaaagcagatgtacaaggttcagtacaggcagttaaacaatctttagaaaaattatcaaatgaagaagttcaagttaaagtaatacatggtggtgttggagctgtaacagaatcagacatattacttgcagcagcttctaacgcaataataataggattcaatgtaagaccagttccaggtgcagaatctctaggagaaaaagaaaatgttgatataagaacatatactataatatacaaggcaatagaagatatacaagcggctatgactggtatgttagaccctgaatatgttgatgaagaaacaggaaaagctgaaataagagaaatatataaaatatctggtgttggaacagtagctggatgttatgtgactaatggtaagatatttagaaattgtaaagtaagattagttagagatagcataataatacatgaaggtgagcttgcagcacttaagagatttaaagatgatgtaaaagaagttaattctggatacgaatgtggtatgagttttgtaaattataacgacataaaagaaggcgatatagtagaagcttatataactaaagaagtagaaagaaaattataaattcgtatcaaagaaaatcagttagtaaagaaggtcgatggtatggcatcatataatagaacaagaaggatagcagaagaaataagaaaagtcgtaagtactatgcttataaatggagtaaaagaccctagaataacatctatggtgagtgtaactgatgtagaagttacaaatgacctaagatatgcttatgtatatgtaagtattctaggtggagatgaagaatccacactaacaggtcttaaaagtgctggaggatatataagaagagaagtaggaaaaaatataaaacttagatatattcctgagatagtatttaaacttgatgattcaatagaaaaaggaatgtatatggataaccttataaaaagagttaatgaaaaaaatgctcaacaaaatgaggatgaaaattatgatgaataatatggatagtattataaactatatttatgagggtgactattttatagttacctctcatatcagtccagatggagacaatgttggttctacactttcaatgtattatacattgaagaatttaggaaaaaatgtatattatgtacttgatgatgaagctccattaaatttaaggtttttggttgaaggtgtaaaaatctataagtctaatgaatttaatatgaagaactattctttaattgcacttgattgtggggataagatgagaatatgtgtgagtgatgaaatcaaaaataatgcatcaaaattaatctgtattgaccatcatgctagtaatgattcatatggagatttaaattatgtagatattgatgcatcttctacatgtgaactagtttataatttattggttagatttcagcaaacaaaagatattaatattataaatgaagatatagcaacatgtttatatacaggtcttgtaactgatactggaaacttttcgtattcaaatgtacatgcaagtagttttgaaatggcaaaaaatttacttgttttaggtgcacaaaaaaatactataatacaaaatatatatcaaagcaattcttctgattattataaattattaggagaagctctaaaaggtttggagatatttgattcaaaggtatctagtatagttttaactcaagacatgatgaatagaaataatattagctttaatgatgttgatggaataacaacatatacaagagatataaaaggtatagaagttggaattttatttaaagagaaaaaacaaaatgaaattaaagtgagttttaggtcaaaaaattatgttgatgtaagtgaaatagccaagttatttggcggtggtggtcatgtaagggctgctggatgtactattagagatagtattgataatgcaaagaaaatggtactagaggcagtgttaaaatcaatttaaggtgacagtaaaatgaataagattataagtatattgaaacccacaggtatgacatctcatgatgttgtaagtagagtgagaaagattttaaatataaaaaaagttggtcatacaggtactcttgacccagatgcttcaggtgttttaccaatctgtatagggaaagctacaaaagtatgtgaagttattttaaacaaagataaatcgtatatatgtgagcttactttaggtataagtacagatacttatgatgcttcaggtgaaattttaaaaaaagttgatgattttaaatttagtaatgaagacatagaaagagcttttgatacacaaagaggagagataaatcaacttcctccaatttattcagctttaaaggtaaatggaaagagaatgtgtgatttagtaagaagtggtagacaatctgaaattactttaaaaacaagaagagtaaatataaaagacataaaaatactaagtataaaaggtaataaagtaatgttttatgttgagtgttctaaagggacttatgtgagaagtatttgccatgatataggagaatatctgggttgtggagctcatatgtcgtttttgaatagaacatcttctggtaaatttgacttagataattcaataacattagaagaattagaattattttatgaaaataaaactttagacaaatacttatatgatatagattatgtccttgattcgtttaattatgttgtattaaaccctaatgctataaaatattatagtaatggtggctcaatagatgataaaaggtttttaaaaaataatttcgataaagatgatgaagttgtaagagtatacagtacagataatttcttaggattaggaaagttatcaaaacacaataatacaataagtgttaaaagtgataagatgttcatataaccaatgtatttaaaaaaacaacaaaagagatagtactataataacttctatagtctatctcttttacttatgctataatagtttgtgaataagttaagagtaaattatattttagcggggaacatttattatggtgattataaaatctataaaagaaatagcaaacataaaagaaagtgtcattaccataggaaattttgatggtgtacacaaaggacatcaagttcttataggaaaaacagttgaatatgcaaaaaaagaaaatatacagagtattgtatttacatttgcaaatcatcctgtaaattactttagaccaaactcaacaaaaaatattataagcaatgatgataaaataaaattattagaagatttgggaatagatatagttgtaatcataccatttgatgagtatatgactaaaatacctgcaaaggatttcgtagatgagatactagtaaaaaaattaaaagctaaaaagatagtaattggacatgactttacatttgcaagggcaaaagaaggcaatgttaatctattaaaaagcttagaacatgaatttggttttgaggtagaagtaataaaacccatcaaaatcaatgatgtaagagtgagtagtacttatattagaagtttagtatcccagggtgatatggctaatgtcaaggaatatttgggtagaaattacaagttagaaggttgtgttatacattctaaacaccttggaagaactataggattcccaacggcaaatattgaccttaagaataatatgctcgttccaaagagaggtatttatgcttctattgtacatattggagatgagacttattttggtgctacaaatgtaggctataacccaacagttaatggaaaaactttgtctattgaaacaaatattttagagtttgatagagatatttatggggaaaatataattgttgaatttttggaaagaataagagatgaaagaaagtttaattcaatagatgacttaaaaaatcaattgtataatgatacaaattatgtgtatgaaaactatgtttgcaaaaacaagtaatgtatgataaaatgattaaggaaaataaccattactcggcatttgaatactccaatcaatgcttagtaataggcgtttctaaaaaaatacggaggtaatctaaatgataaacaaatcagaaataataaaagaatatggaagagctgaaggggatactggttctccagaagtacaaatagctttattaacagctagaataaacgagttaaatggacatttaaaaactcataagaaagaccaccattcaagaagaggactattaaaaatggttggtagaagaagaaacttattagcttacttaaaggaaaaagatcttgaaggatatagagcattaatagctaaattaggattaagaaagtaatttcattctttataaaaaagcaggtatagtgtatacctgcttttttatagttaattcattataaagtaaaatagttaataataaaagtagtttatatgttataaaaaattataaaatgaataatattgggtaagaatattaaaatagtatacaaatacataatcaatttaaaaggaaagacaggataaatatagaaattttataacaggataattagttggaataaggaggatattattttgaaaataaagttagtatgcgatagtttgtgcgatattccagatgaaatatcagaaaaagattatatagagatagttccacttacagttatttttaatgatagggaatatatagaaggagtagatataaagaaagaagagttttataaaaaagtaaaagaaatcaagcaaatacctaaaacttcacaagctacatatatggagtttaaagaagtgtttgataagttcataacagaaggttatcatataatctgtatgacaggggctgcaaacgcatcaggaacttttcaaagtgctatgatagctaaaaatgatgtaaatgaaaatgaaaaaatacatatatttgatactagaaatttatctctaggtagtggacaatatgttataaaggcatgtgaacttcttgaagaaggactgggatttgaagaaattatagatgaattagaaaatactcgcagtagtgtaagattactttttgcaccatatacacttgattttttaaagcagagtggaagagttccagttgcaactgctttgataggaaatatgttaaatataaagcctatatttttctttgataatggggaagctaagttggtaaataaggttagaggaataaagaatatagcaagtaaactggtcgatataattttagaaatgaatgaagggtctttagaaggaaaaatcgtcacaataggttgtggagataatttacacgattgtgaaatattaaaagatgaagtaaataaaagaataaaagcaagaagagtattatttactcgaggaggagtttctatttgctctcatacagggccagatatattggctataagttgttctaattagtagtaatataaggtttttgcatatatatgtgaagataattttatattgttaatttatagtatttttgataatatagtaaatagagtgatatacgtgttttttaataagaggaggacaagcattaatgtttgaacataaaatatttaaaatggattttgcaggaagagaactttctgtagaaataggaaagatttgtgaaatggctagtggtagttgtatagttcgatacagtgacagtatggtaatggtaaatacaactaaatcagccaaacctagagacggaatagacttttttcctttaagtgtggattatgaagaaaaattatactctgtaggtaagatacctggaggttttttaaagagagaagggaagccttcagaaaaagctatacttacatcaagattgatagatagaccaataagacctttattcccaaaaggatttagaaatgatgttcaggtagttgcaacagttctatcagtagaccaagattgtacaccagatatagtagcaatgataggttcttcaatagccctttctatatcagacataccatttaatggaccaacaggttcagtatgtgttggccttgtagatggtgcatttgttgtaaatccaaacgcagagcaaagagaaaaaagttcaatgcatctagttgtttcaggtacaaaggaagcaataatgatggttgaagccggagctgatgaagttccagatgaggtaatgcttgatgctattttatttgctcaccaagaaataaaaaaaatagttgagtttatagaaggtatagttgcagaagttggaaaagaaaaaatgcctgttgaattataccatgcaggagaagaaataactcaattggttcgcgaatttgcaactgataagatgaaaaaagcagttcagacttttgaaaagttagagagaatggaaaatatggatagagttaaagaagaaactttagctcactttgaagaaactttagaagattttgaagattttgttggagatatagaagaagtattacaagatataataaaagaagaagtaagaaaacttatagtacatgaaaatgtaagaccagataatagaaaacttgaagaaataagacctatatggtgtgaaactggcatgatacctagagctcatggttcagccatatttactagaggacaaactcaagtacttaatgttgctactttaggtgctttaggagatgttcaaaaattagatgggttagatgaagaagaaaacaagagatatatgcatcattataatttccccgcatatagtgttggagaagctagaccatcaagaggaccaggaagaagagaaataggacatggtgctttagcagaaagagctttattaccagtaataccatctcaagaagaatttccttatgctattagattagtttctgaagtattaagttcaaatggttctacatctcaagcaagtgtatgtggctcaacattatctttacttgatgcaggtgtacctataaaagatatggttgcaggtatagcaatgggacttataaagcatgatggtaaggttgcagtgctttcagatatacaaggtatggaagaccatttaggcgatatggactttaaagtagctggaacagagtatggtataacagcaatacaaatggatataaaaattgatggtatagataaagaaattctacaacgtgctttaaaacaagctaaagagggtagaatccatatactaggagagatgagaaaaactatatctcagccaaaaccagaactttcaccatatgcacctaagattgttaaaatgcaaataaatcctgacaagataaaagatgtaatagggcctggtggaaagataataactaagataatagacgaaactggagttaagatagatattgaacaaactggggaagtatttatatcaggtattgagattgatatgattaagaaagctcaagaacttataaataatatagtagttgaaccagaagtaggaaaaacttataaaggtaaggtaagtagaataatgaactttggagcatttgttgaaatacttccaggaaaagaaggattacttcatatatctcatatagctcatgaaagagttgccaaagttgaagatgtattgaatataggggatgaagttgaagttaaagttacagagattgatgaaaaaggaagagttaatttatcaagaaaagttcttttaccaaaaccagaacataaaaataaataacttattatataattaaaagcaaagtcttaggattttgcttttttaaatacaaaaaagtagataattttaaaatgatagttatggatggcttatagttctttttctgtaaggctttactcttataaagaagctatttaaaagctgattaatagaaagctttattgatatatatagaatcacttaagttatatttagtgcataaacagagcttatttttaatagtattaaataagaaacaatttgtacataattagggggagttttaatgataatgatggtacttaataagagtaagctcaaaaaaatcataatactaattttagtagtgttattagtattatcaggaggggtaatggtattaaagttatttaacaacaagccagtatttaatttatttaatggtgtagatttaccatatgaaagaggtacaaaggataaaagtggatatgttgcattaacctgtaatatagaccttggatgggaaacagagtacgtagaatccattttagaaacacttaaaaaagaaaatgtaaagattacatttaatgtaactggaaaatgggcagaaaagaataaggatgaattattaaagataaaaaaacaaggacatgaaataggtaatcatggatataaacatttagattattctacattatcatatgaagacaattatgagcaaatagagacctctaaaaagataattgaagaaattataggtgaaaaaactaaattttttcaagcaccagcaggttcctttggtccagaaacagtaaaggctgctaaagcattagggtatacttctatcaaatgggatgccgatactatagattggaaatacaaagaccaaccagaggtaatcattgatagaatgaagaaaaaagacattaaagatagtagtataatcttaatgcatccaaccaacgcaacgacaaaatgtatagatgatattatagctattgtaagagaaaaaggactaaaaccagggaaacttagtgatgtatttaagtagacaaagtataaatatttggttaagattgtataagttgtagttgaattaattaaaagactgacttataatgtaatacatataaaaaataaatataattaaaacatagtgttttcaataatccaatatgaaacaaagaataaattgttaggagaatgtaatgtataagacaaaaatactggaaaatgggcttacaataattggtgaagaaataccatatctaaagtcaataacattaggtatttggataaatgcaggctctaggatagaagaagcacaggtgagtggaacttctcattttatagagcatatgatgtttaaaggaaccaaaaacagaacatcaaaagagattgctagttcaatagataatttgggtggtcaaataaatgcatttacaagtaaagaatgtacatgttattatgtaaaactaatagatgagcatatagatacgggaattgatgtattgagtgatatgatactaaattctaaatttgataaaaatgatatagataaggaaagacttataatattggaagaacttaagatgtatgaagactctccagatgacttatcttatgatttattagtggaaaatatatatgctaatgatggattaggaatgaatataattgggacaaaagaatctctatacaatataactagagaatccatgttagaatacttaaataagtattatattccaaataacgctgttatttctatagctggaaactttaactttgatgatatggtggagaaaatcaaatcaaaatttggacactgggaaaagaaaaatttgagtatagacataagtgaggctaagtttaatccttgctttatatcaaaaaataaagatactgaacaggtgaacttagctatctgcctaaaaggtattccttttgaaaatgatgaagaagtctactcaatggcagtggtaaataatattttcggtggaagtataagctcaaggctttttcagaaaataagggaagaaaaaggtttagtatattcaatatactcatcacagacattatataggaaatgtggtgaattaggcatatttgcaagtatgagtacagaaaatttacaagatgtatataatttaataaagaaagaaattgaaaatataagagaaaactatcttacagaaaaagaaatatctgaaagcaaggaacagttaaaaggaaattatatattggatttagaaagtactagcagtagaatgatgtctactggtaaatctatgttacttagcaaaaaagtaaaaactacagatgaaatacttgaatgtataaataatgttaatattaattcaataaagaaggttgttgataaggtattcaatatcgaaaatattggtacatgtatagttggaagagatgtagaaaagattctacacttggattaatattgaaaaaagtaaatctctggaggtataaaatatgaatttatctgaaatagcaggtaaggaaatagttaacttggtcacaggagaaagattgggggtcattggagaatgtgaccttatactagatgaaactacaggcggtatattagcgcttctaattccaaaggaaaaaggattttttgccagaagaaaagataagtcatttttagaagtaccatggagaaatgtaaaaaaaataggtaatgacatgataattatagaatatgagggatatatttaggaggaaaaaatgagtattttagtgcaaaagtttggtgggacatcagtagaatcatatgaaaaaatgaatgaagtatgtaagatagtaaaagcatacaaaaaaaatgatgaagaattacaattagtattagtagtttcagcaatgggaagaaaaggagctccatatgctacagatacacttataaatttgtgtagtgcagtaaatgatgagccaagtaaaagagaacttgatttaataatgtcttgtggagaaataatatcaggaacaattcttgctaatttattgaatgcacaggggatagattctgttttctttactggtcagcaagcaggtataattacaagtgatgaatattctaatgcaaagataaagtatataaatcctaaaaaggtaaaaagagctttagatgatggtaaggttgtagttatagctggattccagggtgtaacagatgatggagaaataactactcttggaagaggaggaagcgatacatcagcagttgctattggtaaagctttagaatgtgaaacagttgaaatttacactgatgtggatggtataatgactgcagaccctagagtagaaccaaacgctaaagtattgagttttatagattatgaggaagtattccaaatggctgacaaaggtgcaaaagtaatacatccaagagcagtacagttggctaaaagtggaaatataactttagccataaagaatacaatgaatccaacttttgaaggtacaaaaataggttctttatgtagacacttagaagagaatatagaatatgaacaagaaagagattttaaggttgctgttgcaaataaagatagtgtagcacaagttaagattaaatcagcagaagaagtgtttacagaagtattaaatgagatagaaaagaaacttataactatagatatgataaatttctttatatcagaaaaagcatttgttgtagaagatgctgatataaaatcattaaaggaaatactagataaatttgaattagattatgaagtaaatagagactgtgctaaggtaacattgatatgttcaagaattgctgatgaaatgtctggtatcatgtcaaaggtagttagaggattatcaaaagcaggggtatctcttttacaaacatcagactcaaatatgactatatcttgtttagttagtgaagaagatatgcatacagcagtacatgctatacaccaacaattttatttaaaataaactgtataatacaattattttttaatcaaatttaagaatttcatatatatcttaatatatttgatttatttggtaaaactaaattaaatataattttgataggagtttttttatgaaagattatagagaagataatgaaagatttgataaagataattgtagtgaagaatctagttgcgaagagagagaatgtataaagcaatttggtaccaatgaaatgccacctcaacctcctaaagatattcaatgtataactataattggagaaattgagggacattttataggaaatcctcaaaaaaaagctacaaagtacgagcatataattccaatgctatactcaattgaggaaagcaatgatgttaaaggagtgttagttgttttaaacactgttggaggagatattgaagcaggtttagctattgcagaacttttaaacagtacatctaaaaaagtagttactcttgttctaggaggaagtcatagtataggtgttcctcttgctacagcaggagattactcatttatagcaccaacagcaaccatgattatacatccagtgcgaactactggtcttgtgattggtataaatgagacttttgaatattttaaaaagatgcaagatagaataattcaatttataataagaacatcaaatatcaaaaaagatgtacttgaaaaacttatgcatgaaaaagatgaacttgtaagtgatgttggtagtgtattaataggaaaagaagctgtggattatggtcttatagatgaagttggaggactaaaagaagcacttaaaaaattaagagagcttataaaagaatctgaggaagaaaaaaataatgattaaaatttgtttaaataataaaatttatgatataatgatgtaataaagtaggagtgttagtgttaaggcattagcactttttgctgtgaaggggtaaaacttgctaaaaataaggagtgatattaatggccacgaaaaagaagaaaaaaaagaaggtaaataccttaagttttaatgcagaatatcataatttaataacaatatttataggtgtatttttattatatagtttaaattctaattctatgggatggatacctgtgttaatgcaaaatctttttaagggactatttggagggctttcaatagcaataccatttatagtaattataacaggacttttaggattttttgatggaaatgaatatatatataggctaagaaagactaaactatactacataattattttatttatatttgtattttatggattattaaatgcaggaactcttcctgtagatagcccactaaaaggtaacatgtttgatgatgttatgaaattgggtgtaagtggacaaggtagtggtttgatagcaacaactattgcgtattatatgagtaaaatatttggtatagcaggtggatggttaataagtatcttcgcacttatactttctgtaatgtttatatttaatatttctataaaagatttggtgtcaaatgcaaaatcaaaatctaaagcatctaaagacagcaatttaacgtttaaagataaaattgcaaatatgaaaaaatctgcaatagatatgatgactgatgaagtagatgatactactataaataaaaaaccaggtttctttaaagggttaatgtcaaaaggtcttaataatgatgatgaagaagatgaatattttgaagaagaaaatagtgatggtgtagatgataaaactataaaaatagttggatttaataaggcagaagatgagtatttagaaatattagaaggaactcaaagtatgccagagttagatgttttaaaagaattacaaaaagctaccaatgaaaatccagttgtagatactaaaccagaaaaaaaagttgatatagctaaatctaatttaaatatagaaaaaactcaacctatgagtattgtagcagagccagttaatgaggattattcaaactataaaaagcctagcattgagcttttaaataaagtaaataagaagtctgatgaaaatggtaaaaagaaagtgttgaaaaatgcttctcttttagaaaagacactatcagattttggagtggaagcaaaaattaatcaagttacagttggacctactataacaagatatgaaatacaaccaagtccaggagtcaaggtaagtaaaattgtaaatttaactgatgatatagctttaagtttagcagctaaaagtataagaattgaagccccaattcctggtaaaagtgcaattggaatagaagttccaaatgaagaagctcaaatggttggtgtgagagaagttctagaaagtgaagaatttaataattttaactctcctcttgcaatgggacttggaaaagacgtagcaggaaaaattataattggagatataggtaagatgccacacttactaatagctggttctacaggttcaggaaagagtgtgtgtgtaaatacattaataagtagtattttatataaggcaaatcctgatgaagtaaaattactattaatagacccaaaagtagttgaacttgcaaattataatggaataccacatctattgataccagtagttactgaccctaaaaaagctgcaaatgctttaaattgggcagttacagagatgaatagaaggtataaattatttgcagatgctcaagtaaaagatgtaacaagttataatgagaaagcggaagaaaaacttcctaaaatagtaataataatagatgagttagcagatttaatgatggcaagtgcaaatgatgtagaagattatatttgtagattagctcaaatggcaagagctgctggaatgcacttgattgtagcaactcaaagaccatctgttgacgttataacaggggtaataaaggctaatataccatctagaatagcatttgcagtatcatctcaaactgattcaagaacaatccttgatatgggtggtgcagagaagcttctaggtaaaggtgatatgttattctatccacttggtgcagcaaaaccagttagacttcaaggggcattcatatcagagagtgagtcggaaaaagtaattgattttgtaaaaagtcaggttaaagatggaataaaatatgaagaagatataattgaaactatatctaaggttaatacttcaaagagtagtgatgaggatgagtttttgagtgaagcgatagaatttgtcgtggaaagtggtcaagcatctgcctctatgctacagagaagatttaaaataggattcaatagagcagctagacttatagattctatggaagaaagaggcataattggagcaagtgagggaagtaaacctagaaaggtattaataagcaaacaggatttgcagaatttagaaggtgaatagaattgtcagttataaaaatagaaaaagcacttaagctagataaagtaatatttgtagatgtgagaactgaaggagaatatgaagaagaccatatattgaatgcaatcaatatgcctctttttaaaaataatgaacataatgaagttggaacaatttataagatgcagggaaaacatgaagcaatacaaaaagggtttgactatgtatcgtataaattaaaggatatatatttacaagcagcagaacttgcattaaattatgataatattgtcatatattgtgcaagaggcggaatgagaagtggaagtatagtaaatttattatcatcattaggtgtaaatgtatatcaacttgaaggtggatataaggcttatagaaattttgtattagagtatctaaggcatgtaatggatacaaaaaactttgtatctgttcatggattgactggtacaggaaagactgatttgttacatttattagatgaaaaaggaatagatgtactggatttagaaggcatagctaaaaacagtggttctacctttggttttataacttttgataaaaagccaccatctcaaaagaactttgaaacaaaactatttgaaagtgtatttttttcgaaagagaattatatatttgtcgagagtgaaagcaaacgagttggaagtgttacagttccaaatgaaattttcgaggcaatgacacgagaaggacatcatatattattagaatgtgatattgaaaatagagttgatagactttgtagagattatatttatgataaagatgaaggtaatatattgattttaaaagaatgtataaacaagtttagaaaaagattgggtaataaagtagtagatgattatattgatttattagaatcaggtgaatataaagaacttgtaaaaagatatcttttagaatactacgacccactttatatgcattcagtagagaaatataagtatagtaagattataaattttaatgatacacaaaaagctttagaagatgttatagacttatatgagagtatattggaaggagaaagtgaatgttaaaaatagcattggaatcattaggatgctcaaaaaatttagtagatgcagaaataatgatgggaattttaaataacaaaggctataaattaattggagattttgaagaagctgatgtaattatagtaaatacatgtgggtttatagagtcagctaaacaagaatctatagatacgataataaacttttcagagttaaaaaaaactggcaatttaaagttgttgatagtaacagggtgtctagcccaaagatattctgaagaattaaaaactgaaattcctgaaatagatgctatagtaggaacaggaagctatcaaaatatagataaaatacttaaagaattaagtgaaatgcatcaaattgtaagccttaatgatatagagtttgtatttaatgaagatttaccaagatatatatctacacctagctatatggcctatttaaaaattggagaaggatgctccaataattgtacttattgtataataccaaaactaagaggtaaatatagaagtagaaaatttgaagatataattaaagaagctaagaaattagctgaatctggagtaaaagaacttgtggttatagcacaagatacgacaaagtatggttttgatttatatggaaaagaaagattatcagaacttttagaagaacttgcaaaaatagatggatttaagtggataagggttatgtattcatatccagaatctataacagaggaattgatacaagttataaagaaatatgataatatatgtagttactttgatatgccaatacagcatgcaagtaacaatattttaaaattaatgaatagaaaaactactaaagaagatatattaaataaaatcaatctgataagaagtaatataccagatgctatacttagaactacgataatagtagggtttcctggtgaaacagaagatgacttcaaacaacttgtggactttgttgaagaggttaaatttgatagacttggtgcatttgcatattcaagagaagaagatacaccagcagatagattgccaaaccatatagatgaagaagtaaaaatacaaagaagagatactttaatgatgattcaacaaaaaatatctgaagaacttaatgacaaaaagataggaaaaacttatgaggtgttaatagaagaacagatagaagataatgtatatacaggaagaacacaaggtgatgcggaagaaattgacagtatagtgtatgtaaaaagtgtagacaatcttgaagtaggagaatttgtaagtgttcaaataaatgatgcaatggaatacgatttaatgggagatgttttatatgaacttgcctaacaagttaactttgtttagaatatttttaataccagtatttgttttaattatgttgctcaatgtaccaaataaatttttaatagcttgtattatttttataatagcttcaattactgatgctttagatggaaaaatagctagaaaatacaatctagtcactgactttggaaaatttatggacccattagcagataagttattggttatttcagcacttacatgtatgatagaagaccatcttgtaagtagttggatggtaattataatagtggctagagagcttacagttagcatattaagagctatagctgctgctgatggaaaagtaattgctgctggaaacagtggaaaacttaaaacgataactcaaatggtatctatagtgtttttattgttaggcgctcagtttgaaaatgtattgatattaaatattggtgaaattctcattcttatagctacactacttacattatattctggatgggaatatctatataaaaataaagagctttttatgtcttctaagtaaaaaattatgctttaataaataaaaactaatgattaataaataaaaaataacaacttaaaattttaaaaatgtaaaaaagggtatactattatagtatacctcttttcattttaagaatattttcttttgtgtatataattattaataatggtttataaataaaatgtaatgaataaaaatataatcattagtagcgtttttaaattgactaggtttgatttatgttatataattaatatataacaagagaacaaatgtttgtagataaatgaagggatggtatagagatgagtgtagatcaagaaaaattaaaagcgttgaatgaagctttaggtaaaattgaaaaagattttggtaaaggttcagtaatgaaattgggagaagcaacatctatgtctatagatgttatatcaacaggagcgattggtttagacatagctattggtataggaggtctacctagagggagaatagttgaagtatatggtccagaatcttctggtaagactactgttgcgcttagttgtgtagcatcagctcaaaaagatggaggaatagctgcatttatagatgcagaacatgcacttgacccagtatatgcaaaagctttgggtgtggatgttgataacctaataatatctcaaccagatacaggtgaacaggctttagagatagcagaggcattgataagaagtggagcgatagatataatagtaatagactcagtagcagcattagttccaaaggctgaaatagatggagatatgggtgattctcatgtaggtttacaagctagacttatgtcacaagcacttagaaagttaactggttcaattaaaaaatcaaattgtgttgctatatttataaaccagttaagagagaaagtaggaataatgtttggaaacccagaaactactactggaggacgtgcactaaaattctattcatcagttagattggatgttagaaaaatagatacaataaaacaaggtgataaagttataggtagtagaactagagttaaagttgttaaaaacaaagtagcaccaccatttaagcaagctgaatttgatataatgtatggagaagggatttcaaaaattggagaccttttagatatagctgctgatgtagatatagttaaaaaatcaggttcatggtatagttacaatgatactaaacttggacaaggaagagaaaatgttaaaaaattcttggaagataatttagatttaactactgaaatagatgagaaagttagagcattttacaatttaaatgaagaacatgaagaatcaggtacttcagtatcaaaagaaattgtagaagaataagtaaaaatacaaaaaaataactagtaattaaagacatgccacgctccctattagcttgacacaatgttgaaaaaattataaaattaagtgaggataaaatatctaaatttaattttaattattaggaatattttttaatcatagtgatgacattttgggattattaacgaaggaggtggatgtcatagatagtgtagtaatgattgtaataggtgcagctgttggtattatagctggatattttgttagaaaaaatatatctgaagcaaaaattggacaagctgaaaacttggccaaagaaataatagataaagcacaccacgactcagaaacagtacaaaaagaaaaattactagaagctaaagaagagatccataagtggagaacagaagctgaaagagaaaacagagaaagaagaacagaagtacaaaagtatgaaaaaagagtagtacaaaaagaagaagtcttagatagaaaattacaaaatttagaatctaaagaagtaaacctaagtgaaaaattaaaggtagtggaaaagaaagaagaagaagtcgaagtaataaaaactcaacagttagaaaaattagaaagtatatcaggaattacttctgataaggccaaagaaatcatcttaaccaatgcggagagagatgtaagacgtgaaatgtctataatgataaaagagatagaaagtcaagctaaagaagaagctgataagaaatcaagagaaattataggatatgcaattcaaaaatgtgcagcagatcacgtagccgaaactactgtaacagtagtaagcttgcctaatgatgaaatgaaaggtagaataataggtagggaaggtagaaatataaggactttagaaaccttaacaggtatagaccttataatagatgacactccagaagccgtaattttatcaggatttgatccaataagaagagaaattgcaagaattgctctagaaaaattaatagcagatggaagaatacatccagctagaattgaagaaatggttgaaaaggcgagaaaagaagttgacaatattataaaagaatatggtgaacaagctgcatttgaaactagtgtacatgggattcatccggaattaataagattattaggtagacttaactatagaactagttatggacaaaatgtacttaaacattctatagaagttgctcatatagctggtataatggctgctgaaataggagcagatattagattggctaagagggcaggtttattacatgatataggtaaggctgtagaccatgaaatggaaggtacacatgttgaaataggtatggatttacttagacgttataaagagtctaaagaagttatacatgccatgagtactcatcatggagattacgaacctcaaacagtagaggctgtattagttacagcagcagatgcaatatcagctgctagacctggtgcgagaagagaaactttagaagcatatataaagagacttgaaaaattagaagaaatagctaattcatatgaaggtgtagaaaaatcatttgctatacaagctggtagagaaataagaataatggtaaaaccagaagctataaatgatgaagaaatacatctattggctagagatatgactaagaaaatagaggatgaacttgaatatcctggacaaataaaagtaagcataataagagaaacaagagctatagagtatgcgaagtaaaagaaataatatctaaataataagaaaatatttttagaaatttaaatttgccacaagatatgataatatatcttgtggcttttaaattgtttaagtttaattttatataatgcaaaaataatctaagtgctaaaagtgctacttacaaaagattaataaaataaagctttatatatgtattatttatataattatccaagtttgtttgatataatgaagttgtaaaatcaatactttactacaaaataaatagtaaatactacagtaaaatctaaaaataggatataatagtattaatataagaagattataaataaaacctgctaatgaaaatagattatttttagcaggtttttaaattttttataataaatcttatttttagtcaacaagatttattttttttaaaactttacttactattttaaacattaattatgaaatttatcattttattatttacagaaagtattctataacaataaatatctatatttattgcaaaattattttagcagttttgtatttatttgtatttattttgaatttatttactaaatttgcctataaaaagtatatataaaaatatagttcaaaatggtataattaagtataacagaaggaggtaatgtaagtgagccaatacataaatataaattctcagttagacgccctaaaattgaaggagttcgagaaaatattttacgaaaatatcaatgaggacgttaaagtagtgccaaaagttactccttttaaaggaataaataccgatttgttgtatgttaaagatggaagaattttatttataaaatttatggatacaacagaagatatattttttattttagaagaagagttacttgaagttatgaatgaggaatatgaacttttgaaactaaaaatgggacaaaagaatagaaatataagttataactacgtttacattatgccatacgttgaagttgaggaaacatatgaatttgaagaatttgttaataataatataatagataaaaataagcttcaagatataatgaataagggttcgctggaggagtatcttaatgatgagaatgatgaaataaacttaaatttatttttactagacatatgttcagaatactatataataaatgataaacttcatctaaatgaaaaatttaaaaaaatttcattctacaatgatgactataagtatacagcaactatgatggaagacgttcaaattaaagatgttgtttctattaaatatgggaatacacttattgaaggtggttctggtataggcaaaacagcaattatgctttctagggctataaaattagcaaaagtatatccacatcataaattagtcatatttacacatacaaaacaattgtgcaatgagcttcgagagaggatagagttattatacaaagataataacaatttagaagttcacacatttagttcttttatatttaaactagctaaaaaattcaatttaattgtagattataacatgttaaaaaatgattacgaaaagacctttaataatcttgtaaaacaagcacagaacattataaaaaataaaaatatgttcaaggctatttttattgatgaagcagaaagctttttagagtatgaaatagattttataagggagtttttatataaaacaaaattcatatttaatgtgtgttcttgtaactccttgaatatctctaatagattgaatatatttaaaaaattatataatggtatagaatttgatgataagattatcttaagtaaaaattatagacaagctaaagagattgtagattttacaaataaattttcaaataattctaactcatatatcaacgaattaagaccaaatacagaatttagtactttcttttatactaaagcacttagaggtggaaataagtctgttgatataataaaagtaagtgaccttgatgaccaaataagttctgtaatctgggaaattgagtatttaataagtaaaaaaggtcttgattattctgaagttgctatcgtttatccttataataagaagaaattaaaaagtggaaaaaccatttactttcaatatatgttaaaaaaagcattggaagaggcaaaaattccttatatatgtgcagaagataatttgacaaatataagtaagaaggtaggaactacaatagcaaatatatatgcaataaagaatttagagtataaagcggtaatagtatgtgaattagagatgttatacaatcaaactataaatgatattgaacaagattatcaagtaaatgactttgtaggagatttaaataaggtttatttagctatgagtagagcaacagactacctaagtatagtaacaacttttaatgaagaagcaagtgatataataagacttattacagaatcaaaagatatttagtaaaaaaatatttgtaatttaagaaaataaaaagagactgagatttgtaaaataaactttaccaattcagtctcttattttttagtccactttcccaatattatcaagaggtaatagtctcaccataaccttaccaagaatttcatcttcatcaaccatacctacatcagggaatctactatcattactattttctctattatctcccattgcaaatagtttaccttttggaacaacagtatctatatctccagaagtatagttattgtgtatatatggttcatttaataattttccatttacatacactttagaatttgatatttttattctgtcaccttcagtagctataactctttttattaagtcttttttctttcctgtttctccatcaactaaattggttttaaaaactacaatatcgcctttttcaggtttaccaaccttgtatgatatcctatttaaaatcagataatctttatcatctaaagtaggatacattgattctccacttacaacagaaggtcttataaattgtagaattacaaatgcaagtacaatagccatagctattgacttaatccaatcaaatatttcttttttaacactcataacttttctccttatcatttgttattaaattagaatacattataatagaaagaaataagcaagaaccactatacccaagactattctataataaccaaatactttgaagtcatgttttttgatatagtccataaaaaatttaataactacaattgaaacaacaaatgctactacagaaccaacacctaaaataagccattcaaatccagtaaatccaaatccagcttttagaagttttaatgcactagctccaagcattgtaggaatggctaagaagaatgaaaactctgctgctacatatctagaagtaccaagtaatactgcacctattatagtagaaccagacctagatgtacctggtatgagagctagacactggaataatcctatacaaagagctaatttatatgtaacttgagaaaaatctttatacttaggtcttttatttctcttttcaagccctatcattattataccatagacaataagagcaatagcaactactgttgaattaaagaatactctgtctatgtcatcttcaaacagtattccaataactccagatggtataactgcaattataaccttaagccataaacgaactgtttcttttttctgtttaatattctttgcactatcaaaaggatttaactttctaaaaaatataacaagtacagctagtattgaaccaaattgaattacaactaaaaatgtatttataaatgtatttgaaaaattcaattttataaactcattaattaatatcatatgccctgtactacttactggtagccattctgttattccctgaactatgcccaaaatgactgccttaaaaatttcaagcaaactaaatgtttccaaatcaaaatacctccaatacaaatttatagtagcatattttattcatagattaataaaaaaatgccaccttttactaacttataataccatagtactgtgtagtgcacaatggaagattgatattttcataaaaccttcataatataacaaaataaacttaaaagttatctattgaataaggggtatatttgagggggaaatatatggtatagtaaaagtatagctattttattttatgaaaaggaaaggagttattatgtatagtacaaaaatactagatgattatgagtatgaaacttttaatgttttttctacaaaattaaatccaaacacgaaacacgattatttatcaaaggttatactgtttaaagaatttttaaaagggaaagaattgatttatgctacaaaagaagattgtaaaaattttgtagactatatacagactaaatatgcgaaatcaacttgtgaaaagatatatagttatttacatagtttttataacttcttaaaaaaagaaggatacatagatataaatccatttagatatgtagaaaaacccacagtaacaagaataaaaacaaaagatgatgttctaagtatacaagaaataaataaacttataggtatcctaccaaaattaaatataagagatagagtaataatagtctgtctagttactactgggtgtttattaaatgaattagttagcttaaagtggaaagaccttatggtagatgaaaacgataactcatatgtaaggttaggtaagggaagaaaagaaagagtagttaaattacatccatacttttttaaacttttagaagattacaggaattattctgggcttccagaggtaataatacctagtgatgattttatttttacaactcaaaagagtaattctataacagatagaaatgtcagacttatagtcaaaaaagcattagatttagctggactttctcaatattcagcaagagattttagacattcatttgcagcaataagtttaaggcttggggcagatgaaagtgatgtaaaaaatcagcttggatggagtgataaatactatgcaattagatataagtatgtattaaattttgttgatagtgaaatagtggattacttaattgaaaaagataatttggatataaataaaaaatagtaataaataaaaaatactatatatagatgtgaacaaaaaataaaaaagtcttgttatagttcgtaaaattatatataattatttatgtactaatgtgtacacagtaatcacacgacaaaagatttaaggaaggtgctaatataatgatagataataaatatactacttactcaaacccacttacagacagatattgtagcaaggacatgagttatatattttctccacaatttaaattctctacatggagaaggttatgggttgcacttgcagaaggtgaacatgagttaggaatcaatataactgaagaacaattagatgagctaagagctaatatagataatataaattttgatgaagctagaaaaatagaaaaagaagtaagacatgatgtaatgtctcacgtaaaagcttatggtttacaatgtgaaaaagccaaaggaataatacatttaggagcaacatctgcatatgttggagataatacagatgttatacaaatgaatgaagctttaaaacttctaagagtaaagcttgtaaatttaataaacaatttaaaagaatttgcacttaagtacaaagatatgccagctcttggatttacacacttccaagctgctcaacttacaacagtaggaaaaagagcttgtttatgggctcaagatttaattcttgatttggaagatttaaactatagaatagataacatgaagttaagaggagttaaaggtactactggtactcaagcaagttttttaagcttatttgaaggagaccacgaaaaagtaaaagagttagataagaaaatttgtaaaaagatgggataccattcttcctatgcagtaagtggacagacatatactagaaagttagattatcaagtaataagcatactatcagggatagctcaaagtatgcataagatgactaacgatataagacttttacaaagtttaaaagaattagaagagccatttgaaaaaaatcaaataggttcatcagcaatggcttataagagaaacccaatgagaagtgagagaatagcatctttatctaagtatataatctctgaatctataagccctgcaatggtacaagccactcaatggttagagagaacattagatgactcagccaataagagattggcaatacctcaagcatttatggcagcagatgctatacttgaaatagggataaatgtaactgatggtttagtagtatatgaaaatatgataaataaacgtgtaaatgaagaacttccttttatggctacagaaacaatacttatggaagctgtaaaaagaggtggagatagacaggaattacatgaaataataagagaatattctatgaaagctgcctatagagtaaagcacgaaggtaaggataataacttaattgaacttataatgaatgatgattcatttaaaatgagcaaggaagaaatactatctataatggacccaaaaaactttataggtagagctccagaacaagttgtagaatttgtaaatgaagttgtagaacctgctataaaagattataaggaagacttaggaaaagtagatgtggacctaagagtatagaattgtacagataaaatataattaaaaacggctatcttatttataaataagatagccattttaatgggctagcgtcttctcttcagcgctgtgaagagttcttctttacttactataccatgaatttaataaaatagctatataaataatatttaatagaaataatataaataaaaataaaaaaatgataagattactaattaaatttaaacattcagcaaaaactattgtacttgcaatatttttaatgtaaactgaaataaagttatttagataatttaataaattttaaaacaaccgaggtgattatatgaactatatagtaaaagataccataagttttttagtaaaaacatttcctaagatttattctagtctgtacttagaagacctaaaaaaatttgcaccagattataatgtaaataaaacacaattaagagcattagttttcataaaaaattatggagtaataagtatgactgatttatgctctaagttaaatatagaaaaaggcagtttaactagtatggttgatgatttaactgataagaagtatgtaacaaggaaaagagatttagttgatagaagaaaatatctaattgacattactgaagagggagataagatagcaactgattttatggataaattaagtgatggtttaggagaaaaactttctaaattaactgaagaagacagaaaaaaatatttagaagcaataaatactcttcaatatatattaaacaaagaagaatttagatagaaaaaatataaaaaatttttatatttaatagtactaagattaattctttgttattcatttaactatataattataagtctaaatacaatctaaaaagtacatcttaaattttcttgatgtacttttttataatttcttatacattttcttatttgttagtacctactcatacctctttgtgtaatttatatttttccattttatattcaataattttattttctaatctctttttaaatttctatatatcacaatgttactatgtctttgtttgaaaaaatttacagttttgaaaaaattactatttatgtaaaaatattttaaaacaaattataaagtttcaaaaacaaaataaaaatatataattatgacatagaaaacgttttaaaaatttaaaaatggagggatagaaatgaaacaaaaaatgaaagagttttttttacagttaggaaaatcatttttattgccaatagcattaatatctgctgcaggtatatttttaggaataagttcagcattttcaaatcctaatatagttagtgatataccttttttagaaaataattttattcaaggaatattgggttttacaaaagctataacaggagtactttttggaaacttagcaatattctttgctatatcaatatctgttggtcttgctaaagaagaaaaagcagtttctgcattttctggttttgttggttatttagtattacacactagtgtaaattatatgttagggtgtagaggtattcttgctgaacctgacatgatgagagaaatgggtcaagctgtaactttaggcatacaaacattagagttaggagtatttggtggaattgtagttggtataataacagcatcattacataataaatactataatataaaactgccagattatttagggttctttggtggaactaggtttgttccaataataacaacagtagtattctctattttggggataataataccatatatatggccatatgtaaatacaattattcagagtgtaggtattggtatagctagtttaggatatttaggaacctttgtatttggatttcttgaaaggcttttaataccatttggattacatcatatattaaatgctatgtttagatttactgaagtaggaggttctttagttgtaggaggacaagaagtatttggagcattgaacatatttttagctcaactaagtgaccctgaaacaatcagtttttcaacagaagcaactagatttttagctcaagggaaaatacctataatggtatttggtcttcctgctgcagcatatgccatgtataaaactgcaaagcctgaaaataggtcgaaggttaaaggtatattactagctggtgctttagcaacatttgtaacaggaattacggaaccattggaattttcattcttatttgtatcaccaatattatttgttatacatgcatttttatcaggtatatcatttatgatgatgcatatatttggagtagcaataggaaatactcaaggtggcataatagatttagtagtatttggagttatgcaaccaaatacaaagtggatttattctataatacttggtttagtgtatgcactggtttattataatgtatttaaggttttgatacttagatttaacttacaaactccaggacgagaagaaataacagatataaattttgatttagaacctttatcaaataaagtagaaatagctcaaagtggagaaactactaagagagcattatccataattaaatatttaggtggtaaggagaatatagaagatataacaaactgtataactcgcttaagagtagtagttaaagatatgagtaaagtagatgaaaatgcttttaaaaaatatacaggtgcaatgggcgttataaaagtatctgataaagatatccaaataatttatgggccatctgtatctcaagtaagagacgaagtttcttttgcaatgtctatttaatgtctatctaatgtaaatattaaaaggcaatactaatttataatttgtattgtcttttttgtagtataataaacataagataaatgttgtatagtgtatatttatataataaatatgagaaagttgtttaactacaaatcattattatggaggtataaatgaacctaatagacaaattagatataaatcaaaaaaaattatctacaaatgaaatatctcttttaaactattttctaaaaaattctgaaaaaataaatcaaaaaaagattaaagatatagcaaatgaaacttttaattcgactgcatacatagtaaggttttgtcagaagctcggcttttctggatatagtgaatttaaaaactttttagttttttcatattcaaatagaaatgaaagaaataaggagtttactaaaagtcaaagtgatatttttactgatgttatggatacacaaaatttaataaatgtagagaatatagatatgtgtttaaatgaaatacataattctaagcatatatatttttttggtgttgggtcttctagattagtatgtactgaaatgtctcaacgtttttcagctataggtgtaaatgtaaaatactatgatgattcaactctcatgtatttggctgcatcaaatattactaaagatgaccttgtaattgctgtatctatgtctggagagactgctcaagttattaaggcatgtaatatagcaaaaacaaatcaagttaaagtaatttctctgacaaatataagtgtcaattcattatcaaatatagctgatataaaattatttgtatcttctccacaatataattttaatagtgttaactatacgtctagagtgccagcactttctcttatggaatatatgtttcataaatacattgaaaaatacaatagatgaaaaaaattacaattttgaaaaaaatactaaaattgaactatttttaatgattacctaaaagtattcatgtagaaaactttatatattataatcatcttacaagttagttaataaaaaacaggggtgattaatatgacaatgaaaaaaagatacaatatagctatagttggaggaggcagtacttggactccaggacttttaaagtctttatgtaaaatgagtgatagatttcctctaaataaagtaactatgttagatgtagtagaagaacgtcaaagattaataggggaatttggaaaaatattatttaaagaagaatatcctaaagcaacacttgaatatactacaaacccagatgaagcatttatagatgtagattttgtatttgttcaaatgagaactggtggtcttaagatgcgagaattagatgaaaagattcctctacaatttggactggttggtcaagaaacttgtggagctggtggatttgcttatgggttaaggtctataggtgatatgatagaaatggttaagactgtaagaaaatactctcctaaagcatggatattaaattatacaaatcctgctgctattgttgcagaagcattaaaaagagtatttccagatgataaaagattacttaatatgtgtgaccaaccagttaacttgttaaggtcttatggaagattgttagacatggattcaagaacatttgagcctgtatactttggattaaatcactttggatggtttacacatttgtatgataaaaatggtgaagatttggtacctaagataaaagatttagtagcaaactctggattccaacctgttgatgcagaacaaagagataaatcttggttagacacttatggaatggttaaagatatgttggaagatgtaccagattacttacctaatacatatgtacagtattatctatatcctgataaaaaagtagctaaatcaaatataaattgtactagagcaagagaagttatgaatggaagagaaaagcgtgtatttgaagaatgtaaatctgttatagaaaaaggaacatctataggttctaatttagtgcataatgatgctcatggggaatttatagttgaagttgcagaagcaatagctcataacaaacaccaaatagccatagttataacagaaaataatggggctattaacaacttacctgatgatgcaatggtagaagtagctgcgattcttacaaagaatggaccgagacctttacatgtaggtaatataccaacattttataagggactgttagaaggtcaactagcttatgaaaagttagcagttgatgcatactttgaacaatcttatgaaaaagctattttatctttaacattaaatagaactataatctctccaactaaggcaagacaagttttagatgctttaattaaagtgaataaagattactggccaacactatataaagaaaatgaaaaatagtcaggtctaagtcttaattaatatattaattaagaaatgtccccttttcaaataatatctgaaaaggggacattttatatcattaaatttatataaattaagtttaaaaaattatttttgtaaagctacatattgctctaaaccttcttttaataatgtagcagctctatgaaggtctttttcatttaagatgtaagctaatcttatttcatcacgtcctaaacctggagtagcatagaatccttcagcagggcaaaccataactgtttcattatctttgttaaattcttttaacatccaaattgtgaaatcttctgcattttcaactggtaatttagcaactatatagaaagcaccagttggttttttacatataacaccttcaaccttcattaattcattgtataatacatctcttctttttttgtactcttcattaacttctttgaagtaagaaacaggagttttgtataactcaacagctcctatttgctctaatgtaggaacacaaagtcttccttgacataatttaagtatttgagcgataagacctttatttttgcaagcgatagaaccaattctagcaccacaagcactgtatctcttagaaacactgtctattattataactctatcctgtacaccctctaagttaccacagcttgtatactcaagcccatcataaacaaattctctataaacttcgtctgctattatccataaatctttttctttagctatttcagctaggatattaagttcttcttttgtataaattgcaccagttggatttcctgggttagaaagaattatagccttagttttatcatctactttagacaatatttcttctttagatggaaggtggaaaccgttttctgcctttgttgtaacagcattaacttctacatttacagattgaccaaatccattgtagtttgtatagaatggttctggaactaatagattatctcctgggtcacaaactgccatcatagtgaaaagtaaagcttcactaccaccattagttactaataattcatctttttcaaaattcatatcgtaagttttatagtaattttgaagtgcttctaataattctggaataccttctgatgtagcatattctaagacttcgctatcaaagtttttaacagcatcaaaaaatcctttaggagtttttatgtctggttgtcctatgtttaagtgatatactttgattcctttatcttttgctgcttgtgcaaatggaacaagttttctgattggagaggcttgcattgcactaactctgtttgaataattcattttaataccccctatttaatttaaatacgtatattgtattatgtaaattgtatgtttgaatacaagacatctttacaagataataataacatacttatgggtaaaaatcatcaaaaaaaattaatatagctttaaaataaacttttaacaaattatagtaaaatacccatgtttatgccactaaattatgtattcataaattaatttatagtaagataatattctgatacactgatagtgattttttagttataatctttcagctatagacaaaatatataataataaatatgcaaaattataaaaaatattataaatttatttaacagatacgataaatatcatataattatattaaaggctattaactaagaggtgttaattatgaaagaattaagaatagatccaattactaatgatgttgttatatttgctacagataggttaaaaagacctttagatacagcagatatcccaaatgaagatgaagaaactaatgaatatgatgaagaatgcccattttgcaaaggaaatgaagctcatgcaactgatgcattatttgaaatagaaagtgaagaaggatggcttgtaaaatctgtctacaataaatttcctataattgatgatatggcaagagatgtatatggtgttcatgaagtaatgatagagagcgataaacataatcgtagtttttataacatgagtcaaaaagaatttgaagatgttttttttatgtatagaaatagatttagagatttgtcgaaagatgataaagtagagtatgttagtatcttcaaaaacttcttgagaaaggcaggagcatctttgatgcatccacatgctcaaatattgtctatgtcttttattccacctgaaattacgaatgaactgttagtttcaaaggagtattatgacagcaataaaagctctttgtatgatgatttaatagaaaatgaaataagtttagatagaagagttgtttataatggagaagcttttttggtacttataccatatgcaaccaagtatagtggagaagtaagaataatatttaaagataaaatagagtttggtgagttaaatgataataatatacaggagctttctacaatatttgaaaagttgtttaagaagttatacaatatcaatggatatatgccatttaacttatgtattcacactcatccaacaaagattgaaacaaaatcgtattttaatgttcatatgcacataatcccaagaaaatataattttggaggatttgaacttggaacaaatatgtatgtttcttcaatgagccctgaagatttaacaaaaaagttaaaaattgattaaaacatatatttttaggtattaagtaaatagtaattatagatgaaattatagtatagtattgttaaaataaaagtaaattaagaatttacaataaaattgttgaaaagcccccatctttagctatggggagtgtgtcaatgtttagatgaggagtataagtatgaaatttatatcatggaatgttaatggaataagagcttgtgttgggaaaggatttttagactttttcaaagaagtagatgcagatatattttgtttacaagaaactaaattgcaagaagggcaaatagagttagatttaccaggatattttcaatattggaattatgctgagagaaagggttattcaggtactgctatatttacaaaaaaagagcctttaaaagtaatgtatggaataaatatagaagaacatgacaaagagggtagagtgataactctagagtttgaagatttttactttgttacagtatatacgccaaattctcaatctgaattaaagagactagaatatagaactagatgggaagacgactttatagattatttaaccaaactagataatcataagcctgtaattgtgtgtggagatatgaacgttgcacataaagaaatagatttaaaaaatcctaaaaataatatgaaaaatgcaggttttactaaagaagaaagagagaagttttctaaattattagacagtgggtttatagacacatatagatattttaatcctgataaagaaggcgtttatagttggtggtcatatagatttaatgcaagaaaaaataatgcagggtggagaatagattatttttgtgcatccaaaaaattagaagatagattagtaagtgcggatatacacactgaaatattaggttcagaccattgtccagttgaattagagataaaataaaaattaattacgataaaaattgggctgtagatataaatttaaagttaactagttttttaatctacatgcctattttttatctaaataaactctatttgttttttctttgcttaacattttctaatgtaaattgatttgttttccccatattataagctaagttaatgatttttttctcgtctttagttaattcacgatttaaaattttcctaaattcatcaaataacttatcataatcaactctttttttattagaatatcttatagttttaggttttatactcgtataaagatatatatctgggactatacttggattgtatatcttaataaaaactttagcagtataatatgcatcatttaaagcattgtgataagacattttttcatcaagttccaatatagaaatagcattttgtaggccaatgctttttcctgctggattattgaaatatttagatgcatgttgttgtatattaatataagatttaggtaaggaacttgatggtagcttgtgatagttgatattcctgtataattcctttaaatctccaactccccaaacacataatatagggtcttgtgatgatataaattttataaaattgttgtagacctcagggaaagtaggcgaatcattaaaatcagaatttttaatattagtcatacgactaataaagggatgtatgtctttataaattgtaggttttacatagctattaaacgtatctattatattgaatttagaatccaatttaattgctcctatttgtataatttcaaaaggacacttttcattggatacagttttattgagttttttatcaaatccttggttaaattccaaatcgaaaattatgtattccataaagtttatctcctaaatttttttattatttcttttactatagattatattataaataaaattaaattttcaaataaaaatacttttattttagtataccccatatttgtaaaaatgttaaactattgtatgtataatattttttccaataaaaaatattgcgaactttttatacttgatatataataatataaataaaaacacgaataaaacacgaataatttgcaagaaaaattcatgaatgtaaggaaaatgaaatttatcttgtatttaacaaaataaaatatacataaaaattatgggagagtggaaaaatggatagtctattatacgtaatagagaaagataaacacactaatgaagaattaagagaaatcctaaaaagcaataaaaatataagatttgtttccttaatgggggttgatttaggaggaaatgcaacagatgaaaagattcctgtagaattatttttggaggatatagataaatttttggaatcagctatacagactgatggttcaagtgttgagctttataatatagctacattaaataatgcgaaagtagatttaatgccagataaaagttgtcattggtatgtagattacaatatggaatatatagacgaagaagtaggtctacctgttggaacattaaagatacctgcatttttaatacatgataataaaaaagtatgttctagaggagtacttcaaaaagcagataagtactttaaaaagtcaatgtatgaaatatttagagaatatccacatgtaataaataacataggaatagattcagtagatgatatagaggaaataatgttaacagcagctacagaacttgagttctgggttaatactcctgaggataaagctgacttagagaaattatatgtatcacaaagcctaaaagagcaatactggaaaagaactcatggtattataagaacttgtttagagaaaagtttaattatacttcaaaagctaggtgtaaaccctgaaatggctcacaaagaggtcggaggaatacaaagttctattagtatagatggaagaacaaaccatgctatggagcaattagaggtttcttggaagttttctacaccattacaagcagcagacaatgaattattagtaagagatgttatagaggatgtatttacatcacatggactagaagttacatttaaagcaaagccaattcatggagtagcaggaagtggtggacatacacatgtaggagtaagtgcgaagttaaaggatggaagtataaaaaatctatttgctccaaaagatttaaaagaagattatctaagtgaactaggatatggggctcttatgggacttctttacaattatgaagtattaaacccaattgtaacagcttctaatgatggatttaatagattagttcctggatttgaagctcctgtatgcatagttacatctttagggcatagttatgagattccatcaagaaataggtcagtgcttgttggattaataagagatatgaaaaatccaaagactgtaagatttgagttaaggtcaccaagccctctatctaacacgtatttagtaatagcaggatgttatcaaacaatgttggatggtataaaagcagcagctaagagtggtcttagtacaaaagaacttgaaaaagagttatctaaaaatgtaggtgaagaaagtttctatttagaaaaagatagagcatatagagatgaaaatgatgtatttgaacattatagtttggaagaaagaaatgcaagatttggaataccaccggctacagtttatgaaaatatgaaaaacttagaaatatatgcttcaaaattaaaatctttaaaacaaggtgatgtatttactgatagtataatagaatcatttaagattggagctatagataagtggcaaaaaaaattaaaaactagaataatagaggctgggattcaaaaaataagaagtattgtcaagatacacacaaaagaaaatatggatgcgcttgatgaggtagtttggaactcaatatcggatttaaagttcaatattatgaaggatactttaactagagaatcactattcactagagtgagagaagctatagaaaataaggattaccagactgcttcagatttacaaatagaattaaagagaagtatggaagaaatacaacaactgtatatgcagtacaagaaaaatatatactaatataacaatttgattttgatatgataaaggcaatcaagtattattaaacactatgagtaaattctcaagtgtaaaagcatacttgattgcctttaattttatgtttgaaattttttaatagtacaatttaactgtaatgattatctattaattctgatatataatcagcaattttctctggatgaataactgttttaaattcttctaaattttttttcataaagtttattatagaatcaaattcatttgatactaatttataaaatatgtttttaaggtctaggtcatcactataaatcatgccaagacccttatctattataaatttagcgttttcaatttcttgtccaacttttggcattttcacgagtactggagtttgtgattgaatagcttcaaatatagttgctcctccaggcttagttagcattaggtcacattctcttattagattatacatgtcgtttacaaatccaagtactttaatattttttagaggttttttatgagttagattgtcatataattttttgtttttaccagtaactattgtaatttctatagaattactatgttcttcaataaattcatctatccaatgcataaaatcctcatctatatcaaataggcctcttcctccacctagaagtaatagtctatatttatcacaacatagttctttactttcaatttgaaatctcttatcaacaggaactccagtaacctttatggagtctggatttattcctttctgaaaaaatctattttttatttcaggagaaggaacaaaatacaaatctgtattttcaaaaacccattccatactatctacaacatctgttataactgtaagtgtaggtatatttatatcaggattttttatcttaaagttatttacacaagcagccgctagtggaaatgtagagataatcaaatctggatttatatcagcaatatactcagaaagtttaggtgtatataatttatgagataaatcatgtcttgaatcaaacgatttcttaaagtaataatagtaattatataatccaggagtatattttgtattgttttcataaagttttaccataggtttattcatcatgggaatacttgcatttataaagttttgtataacaacattatagttactatatttttcaataatacattctttgactgcttttgcagcacttatatgtccagcaccaaattgagcagttaagattaatattgttttatcatctttcattttagccaatttatcaccactttcataaaatatatctgattagagtattatacatttatagaaggatttaatcaacaagaatatttaaaaataactattgtgcagaacatagtactgtgttattatgaggatataagaagttttaacatagtaccttgtaaaacacaatactgtgtatttaaagaaaggatggagtatatgaacacacaatttagaaagggtgttttagaaatttgtgtacttgctctcatatctaagaaagatatgtatggatatgagatagtacataacatctctaaagtaatagatgtaaatgaaggaacaatatatcctattctaagaagacttacaaaagatttgtatttcgaaacatatatactagaatctaatgaaggtcctgctagaaaatactatagaataacttcactaggaaaagagaatttatccaatctgatggaagagtggagagaatttgtaaaggctgttgagattttaataagtgaagatgagggaggtaatgaacttgaataaaactgagtttcttgaaattttaaaggattatctaaaaaaagatttttctgagagcgaagttaatgatatattgagagattatgaagagtatttcgtagatggtcttatagagggaaagagtgatatggagataatagcatcacttggttcaccaaaatctatagccaaagaacttatcttgcagactaaagaaaaaaatattgaagaggaaaaaataataaatacagatgttttgaatgataagtttagtaaatttaaatcagatatgaaaaaaggttactctatcttaaaagatgaagcaaaagaaaagtatagtaaatcaaaagaaaatatagatggaaaaataatgaatacagatatattaaatggtaaatttagtaggtttaaatcaaatataaaaaaggattactctatcttgaaagatgaagctaaggaaaagtacaataaatcaaaagaaaatataaatgataaacttacaccaagtatagaagaaggtgtagggggattatctagacaagttataaagggattattagtagtgttatctttatttctaattgttccagcatttgcgtttgtatgtgctattgtatctgttactattgcattagtatgttcattaattgcttttgttatattaattccatttgtgattaaatttatagcaatggttccagatgttatgatgttttgtattttcgcaaccatagcatttgtagggcttgagatacttgcatggcaaattttattatttgctataaaactaggtaaacaattactaaataattatatacattggataaagagaaaaaatatttatataaaggcaaatgaaaagatggaaaaaagaaaaaaagctactttaaatgatgaagatttgaataaagacattaatgaagattcatataataatgattactacaatagagaagaagaaagcataaaagaaactgatgaatataatgatgatagtataaattttgaggcgatatataaggaccttgaagatatagaaaataagaaaggagaagataaacatgaataaaaaacttgctatatttgctgcagttttattggtaataggtataatagggacaacatggtcagggattttagttatgccaagcctaataaactttggtttagaaaaggaagctgaatttaaaaaagaaaataaactttatcaagaaaaagtaaatattgacaagttagatatatctgttgacaatataaacgttacaataaagaaaagttcaagtgaagatgtgcgtgtaacaacaagaggaaataatgagttttacaaatacaatgtaactttaaaagataagactttagttgtaaaaggtgaaagaaaatatgaaaataaaattaaaaagattaaaaatttcgaccaattattaaatacatctataaatagtatgttttcacatgattatagagaaattataatatatgtaccaaataatgtagacataaatgcatcaagtacaagttcatacttatttgtatatgataatgtagcttcaaatactataacatataaaacttcttatggaggttttagtagagctataacagagaacaaagtaaatagattagaaaacctaaacttaatatctaatagcaatcttcacttgtcaacaaaatcaattttaggcgttaaaaatgtaaacatagaatcagagtcattggatatatcttcagagaatgaagatgtatttatcaataatatagaagagtatatacctgaaaatgtaaatataaaagagaaaataggtagaaattcaaattatgaaagtgaattttacttgtactctaatatgccaattgctaagttcctggacatagaagttccaaattctaaggtaagacttgatataccagtaaataagtataaatttaattgtgatataaagtcaaaagaagcaattgaagaatttaataatgatgaagaatatgacaatgattcatatgattatgaacatagtgaagaacatagcaacaagtatagaaatacgagggaaataaaagggcttttgaataaaaatctgtcgaatttagagaaagaatatactataaaaataaattcaaatagcttagaattgtaaataatttactataataatttataaattgatttaaaagtataaaaatataatctatactatggtataataagtatcgaaagagaattaggagagggatacttatgaataaaatagcagtaagttttttaataattgctactactttattgagtacagcatgtatggattatagcatcagtgcagttgagctagttgattctaaagaatcagcagttgtaaagaaggatgaagatgcaaaagaagaaacaactagtaaaatgattaattctaaaaaaactactaaaatacctatagagataatttcaaaggatgagaaaatagtaaagtacttacagattgatgaagaaagttcacttaaggataaactgcgattaatcttagatacattatcaaatgagtattttaatggtttagacatggaagtagaagttaaggaaaaagataatcttgttaaaataaacttgatagaaccagataaaaaaagtagagtttcttggaaagatgattatttgaatgaacaaaatataatatatactataaataatattattaaaaatgtcatccaagaagaagataatagcatttggattgaagaagtagagatatactacaatggaaaattaatagaattaagataaaaaaagatgtgtttttaacacatcttttttttgttttttaattcttataaaatccttatatttatgatttagaatgattcttgtaaataagtttgacaaaagaaaggatgaaaattatgaataattatattttgcaggtaaaaggagtttctaaaaaatttaaggagcagatggcagttgataatatttcactagcaattaaatctaattctatatatggattattaggaccaaatggagctgggaaatctactttattaaaaatgataactgggattttaaatccaacttcaggaaaaataatgtttgagggacatagatggactagaaaggatttatcaaatattggttctcttattgagtctcctgctatatatgagaatttaacagcacgagaaaatttaaaagtccatactactttacttggtcttcctgactctcgaattgaagaagttttagagactgtcgacttaagagatacttttaaaaagcgttcaggtcaattctctctaggtatgaagcaacgtcttggtattgctattgcattattaaatcacccaaaacttttaatcttagacgagcctacaaatggtcttgaccctattggtattgaagaacttagaaaattgattcgttcttttccaaaacaaggaattacagttattttatcaagccatatcttgtctgaagttgaacaagtcgtagatgaaatcggaataatttctaatggagtaattggttatcaaggagaagtatcaaaagaacaaaacttagaaaaactttttatgaaagttgtagctgaaaatagaaagagaggggagtaatatggaaagatttattagagtggaatttcaaaagatgaaaggaacttttggaatgaagttgatatggatagttccagtgttttgtatacttttgtgtggactaggtggagggcaaaatgctgctttcaactggtggtatacgacatttcttccaggagcattaacattaatatcttctttaatagtattaaaagatgaaaaaagtaaatatcgtggtattttaccattgccaattgaaatgaaagacgtttgggctggaaaaatgatttactgtattatttgttgttctatagcatcgattatttctgcaataggtgtagtttttgttgggataatctataaagaaactatttcaataggtcaaaatatcattgcaactatattaattattttactatttatgtggcagattcctctttgtatgtttttagcttcaaaatttggtatatttgttacagttctaacaaatatgttctttactattgttggagttgctgttttctcaactacagaaatgtggtatgtatttccatattcgattccttcaagattaatggttgttgtattgcatattctaccaaatgggcttcctgtaccagaggggagtgaacttttaaataatgctgttattttaccaggagtattaatatctgttattttatttgtattatttgctttagttacaagagcttggttcaataatagagaggtgaagtaatatgagacaactaataagaatattttgttctgatttaataaaattaaagagaaattttataatactaatgcacatttgcattgctttaatggggatgggattgtttttatggtattataaggtttcaggagctgataatatattaaagatagtagcatatttacaagttatagcaatagcttttcctttattgtcaggtgttgtgtgttcaatgtttgttgaacaagaatattatgcagggaattataaacatatgttaacaacatctaatccaaaatatcttactcttataagtaaatatataatcttagtatgtcttggttttgtagcaacattagtgtctgtattaggttttaaatttggtatatctaaggcttactttacatcaagcttttatatgatttcaattctaattttaattgggtgtaatttatttgaatacatattacatttattcttaagtttaaggttcggaaaaggaacatcaattggagtaggtatagttgaaatgttactttcagcattattattaactggattgggttctggcatttggcagtattttccttgtgcatggggtgttagatttataactatttggtcgtctttttcaagttctaaaacggttgaatatataaaggttgaatcaataaaagcatatcaatcaacaggtttaatgtgtggttttgtaacaattttagcatttgtaattttatgtatttggttttctaaatgggaaggtaaaaagtcagaagaataaataaaaattgactgtttatttacattatatttatattattatgttaaaatataacttagcaatgaaaaatataaaataatcaaataaaaactggttaggtattaattatgaattaattaaaatatttggaggatatggcacaaatgcttagaagtaaaaaatctaacaacaaaaaagttgaaaagttaagaactatttttataaaatatttatctttattctttgttatgacaatttcatttgcacttcttttaatgttatcattttctgtattattatcatcaggtgtaatattaccagctaattattcagaaaaacaatttgataaatataaagaaaagattatttcaagtgaaaaagcaattgaagatataattccaaatttatacgagtatggtgtttatactttagatgggaatttgatctcaggcacttttaataaaaaagaatcaaaacaagtatggaatttaatgagagatattgaagaaaggcatgcatattcagaaagttatataaagttttttaagaaagatgaagtttttataataaaatacaaactagtatcagagtatagttctccagttttaagagcatatttaccaaaaccagagatgttaggtatgattatttttagtataatattttttattgaaattgttatattatcaaaagtatttggcaagaaatttaatattgaaatggagcttttaaaaaatactacagaaaaaatagaacaacaggatttagattttgttgtagaatctagtaaaatttatgaaattaacaatatccttttttctatggataaaatgaagttggcgttaaagaattctttagaaaaacaatggatgctagaagaaaatagaaaggaacagatatctgcactggcacatgatataaaaacaccattaacaattatacatggaaatactgacttattaattgaaataaatgaaaatcctgagttattagaatacatggaatatatctcaaagggtgtcactcaaatagaaaaatatattaatactttaatagatatatcaaaaacagagaatggctatatattaaataaagaagcaattaatatgagtgagtttataaaagatgtcttactgcaaatagaagcattagctagtactaaaaacttagatgtggagttttataaacaagataatttgcctaaaaatataactatagatagagaactgttattcagagctattatgaatataatttcaaatgctatagattattcaccaagccagagtaaactatacataagtgtatcagtaagtaataaatacttaaaatttgtagttacagattgtggaagtggtttttctaaagcagatttgtcaaaagctacagaacagttttatacaggagatttgagtagaaattctaaatctcattacggaatgggactttatattgtaaataatattgtacaaaaacataatggaattttatatattgaaaattctgtgaaaactggtggtgctatggtaacaattgaaataccaatagtttagtaaataatatccattttgtaaatacctaaattttatgatttataggtatttataaaatggatagtttttttgattttatatattagttaaatctgataaaaagttttcaaacataactccatcatttctatcagtatcaaattgagatgtgtaatttatagttttatatataaaatctgttgcagtattaaccgctactcccaaatcatgtttatttactaacataccacaaagtatagatgtgaatatatctccagttccactgtaagaacaattattgtatttgactgatgtaaagaatacatggtcattatctctatcataagccaaatttaatatattatcatcttctaatataccagtaataacgactttgctaggtcccaaatcagatacagattttgcaatatatataagctcatctctattataatcgcttttagtataatcatttccagttaagaaacaagcttctgttaaattaggagtagttaaatctgaatgtttaactaattctttaatttcctgtctcatttcttctgtgaatattggatacataactccattatcacccatcacagggtcaactacgataaaagcattgggataatcatttataaaattagccactatctcaatttgatgctttgaacccaaaaaaccactatatatactatcaaaattgacttttaaatttttccaaacatttgaatattttaccatttcatcagtaaagtctaagaaagtaaattcaggataaccagtttgacttgaaagtatggccgttggaaatggacaacattgaacctttaatgctgaaagtataggtatagcaaccgataatgagcattttcctattccagataagtcattaattgctgcgacttttttttgcataaaaaaccctccattagtatgtattaattataatgataccaaaatatttatatacatatatattactataaaaaaaagaaaaaagtagattataaaataaaaaattgtaaaaaaaacagtgtattgatacaattaatttttaatattggacataataaaatagagaattattaaatatgaaaattattgtatatgacagaatcttctttgtaatttcatttataaggtgtactatttgggaggtgtagctttgaaaatactgaaaaataagaataagtacatcaaaggtataatggcatttgtatttttgtctttagctactacagcaggtgtatttttaatcaatgatttaagtatgaaaaatatggaagaaaaagtcatggaatctgcaaatgttgaaggtgatgatgtaaaagaccaatataaactattgcttgaaaacttatttgactacagaaataaggcaatattagagaaaaatgaaaacattttaaaaggtctttatgagacggataaaaaatttggtctgtgggcttatgaaaatgaagtaaaaaagatgaagtatttagaaaactggtctagtaagcaaggtgtaaaatttaaagacataaagacaagggttaagattaaaaaaataaaagaaaaagaaaaagacctctatggtataatctgttcagtatcgactgaatataagtattcatatgaaaatcaaaaggacaaagaaaatgcctttagaataggtacatatcattatctaaatgtaaaaattatagataatcaatatgtcataactaaagagtggtacacagacccttttgcagactctttaaatttagaaaatataaaatctgaggatataagaaactatattgggcaacaagatggtgtagagttacagcttacagatgaacaaaaaaaggctatagattatgcacataaatactgtggagccgcagctgatgaagaacatggtatgaaatttaatccaaactatagggattataatccagaaggtggagattgtgcaaactttgcatcacagataatgtttgaaagtggaaggttcaaaaagaactcaatttggaattatagcgagagagcaggtacaaaagcatgggtaaatgcacaagcttttaaaaattatgcactgtatagtggaagaggttcattaattgctaaaggttcctatgaagaagtatacaaagaagcttataatttacgtccgggggattttgttggttatgagaagaaaggcagaataacacatgtttcgacagtgacaggattagactcaagaggatatcctttggtaacttgccataatactgatagaatgttggtgccatgggatttaggctggagtgataagtccataagattccatataataaaaataaattattaaaaaattataaagaaaaataaagtgtaaaagataataatcatttaaaattataaagtaaaaaaattgattattaatgtataaaaataataataattgacaaacatagctatatatgatagagtagtaataaggttacagaaaagagtagctaaatatttgtgtttttttaggaggatttattaatgaaaactggtgtagttaaatggtttaacaacgaaaaaggatttggattcatatctgtagaaggtgaaggagatgttttcgtacatttctcagctataactggagatggatacaaaacattagaagaaggacaaagcgttgagttcgaagtagtagatggagctaaaggtcctcaagctgctaacgtagttagattataattaaaaattcatatatattagtgttctagtaatatgagagataagccgctaatcatttagcggttttttcagtttttgtaaataaaattaatagcaaaataaattaaaattattaaaataaaatcattaataatgagataaatatgttaaaattaatagtgtagagtaaaattattatggctaagtttaagtcaattaatttttagtaaattttctaaaaagagaataagtgatactgatagaccatataaaaatattaataaagcataataagattaaaatgagcaaaggaaaaacgcttgttacagcgtatagtattaagaatacttagaaaataagaaaggagaaagttactgcaaaaaagtaacattataaatattgagtaatatttataagttttcagtaacggtgggtagtgtaatgaacatattattctttctaacaccaaaaagtgaagtagcatatatatatgaagactacactataaggcaagcactagaaaaaatggaatatcacaaatactctgcaattccaataataagtaaggatggtaaatatgttggaactataacagaaggtgattttttatggacattaaaaaacgatttaaatctggacttaaagggattggaagatgttccagtgacagatataaatagaaaaatggataattctcctgtttccatcaacgcagatattgaagatttagttataaaatctttaaatcaaaatttcattcctgttatagatgaccaagacacatttattgggataataaaaagaagagatgtaataggttactgttatgagataatacgtggatataaaaatttagctaatgataattaaaaatcttatttaaacttttaagctgagttctttacaataaaagaatgataatatgaaactgaatatttaaactttaatataaaaagctgtcttttctaataaatattgtgaaaagacagcttttttatatatgaccttatgattaatcgttgtattttacaaggtttccgtacttagcattaagagcatttatcttatttccataaacttcattttgtttttgatataataaacttttttcaacttcagccttaacttcatcaaatgtagactctgtactttcttgaaggtcttctaattttattatatggtatccaaattgagttttaactggttcacttacttcacctttagccatagagaacacagcttcttcaaattcaggaaccatttgtcctctaccgaatgttcctaaatcaccacccatatctttagatgggcaagaagaatgtttaagagctgcatcttcaaaagatatttcttctgattttatttgagcaagtatttctttagctttttcatcactatctactaatatatgtttagcagttgcactttctggtttagagaaagagctcttattagcttcaaagaattttactttttcatcttctgttacattaacactagataaaactttatttatagcaaattgctttaatacattttcttctatctttttcatttctaatttaaatatttcttcttcatctaatttttcttctttagcatctaagaagaataattcttgattcactaaatcatttaataagtgtttttttccttcttcagttttaaattgcatagcttgataagggtctaatgattttaatgcattttcaatatcaatattagttatctctttttctccaactgttgctaaaacttttttttccataatagttaactccttcatagtgtatttcattattaatataagactaccatcttaaataatatcagaaaataatgtagatgtctaatatttaaagccatattaagtcaaatagaattaaatttagtagaacaaagttattacaattaataaaagtgagctcataatacccactacaccttcatcatctttaaatttaagagtttttactattgaataataaaggtatattccagtaaaaataatctttaaatacaagaaaaataaactctttgggtatattaaaaagctaaaaagtgtaaatataaaagcaagtagagtacttatcctgtaaaagaaatctatttgtgtaatgtctttatattttatcataaacaccgaatataaaatgatgaaaataattgcgacgattgcatatatggtaaataacatattttcaagagtaccatttgaaattactatccacttataccacataattggccaaaataatagtgctaagaacttaaaataattatcaaacaacttttctttatacattcatcaaacaacctttcttaacaaaagcatatatttgtttttagaattttaaataatatgatatcattattatatattaatattgaatttatagaaaccaaaatttgttaaaataaatatatagattttactgttaagccagttaaaattactactatttttattatgaaattggatcaaatatgtagaaatacggcaaattagttaatattaaatatttattatttccaagttgtaaagactgtttttttaatgataaaaattctaatcttttttgaaagaaagtaatatccacattaagtatgtctgccatttcataaacgcaagtgatgccagaattaattatgtttattatatcttcttcagtaattaagaactcacaagcccattttaaggctttattttcgcacttatctataataatttttgtataataatcgttataagaggatacatagtatccaaggctagtgaaatgatgtccaagttcttcagctaagatggatgtcaatttttttgagttttgttttaaattactgagtaatgatataattttaataccatgtttgtttatatatagcccttctaaatcacctgcaatataagtggtataatgaattattatctcttcttgagaagctaattcaaaaagcttatccaaattattcataaaaatccccctaaaatagaatgtatgtttgcctttaaattatattaaaagagcagaaaaatagactgctcatcatatggtttatttttttttatatttatttagtaaaaattctatataatcattaagttgttcttgtgcttcttcaggtaactcttcatgtggattttttctatgtgcagctactgtatcaatattttccttaactaaggttcttccaagaaggtaatcaactgatacattaaatacatcagccaatttgtttaaaatgtgttcatcaggaaatctgttttctgtttcatagtaccctaagactctttgggaaacgcctactttttctccaagttctctttgagtcaatccaaattcctttctaagttctcttaatcttttggcaaacattataacaccaccttatgtatagattataacaaattgttctaaaaaataaaactaataaaatataaaagaatatttttttctaaaatctattgataaagaacaaatgattctatataatctaagtgtggaagaacaaaatattcttaatggtaatggaggtataaaacaatgtttaaaaataacttgaaatattatagaaaatgcaaaggtatgacacaaattcaacttgccagaaaggctggaattacaaatgactatatatctcaaatagaaagaggtataaaaaatcctggtcttcttatggctaagaagatttctagtattttagaacaaaatatagaagaagttttttttatacagttatagaacaatatgttcttgaaagttgtgagattagtaaaaaactgtgcactaaagagattattgtaaatttgaagctaataataagtatataaaaaaggagaagtactatggaaaacaaaaaagatatattatttaaagaaacagatgaaagattacataattataagtatttggatataaagataaagaatattaatttggacataaaaagatgtgagaatgaatactctggatgtggagcaatggtatatacagaaaagactagtaacacatataacataagttcttctgtggaaaatgaggtgttaaaaagagaggaaagattaagaaaattaaaaatggaaaaagaagatatagaaatagaaaaagagaagatagaaaatgctctaacatgtctaaatgatatagaaatggaattttttaatcttttttataatagtaagacaaaaaacaatatgacatatatttctatgaaactacacttagatagaacatcttgctacaatttaaagaaaaaaatgatatttaaattgagtgagatattataaaaaatatgacaactttacaacactttatatacactattgcaacactaggcaataaaatatgtgagataatgttattgtgaaagaaatccatattgaaggaggtgataaattgaaaagaataatattacctaaaaatatagaagatatttgacaggaataaatgagatgtatatttaaaaatgacttatatcatttatagtaagattatcagattaagcaagaatatttagtgatagtgtggtgattatttgcttaaatacaaggaaatattagaaacaattattgagattctcaaaaaaaactttactgaaagtatttttattgatgatgaaagtgtgcaaggctctgaagggtcttgtttttttgtaagtatactatcagttatttgtacacctataatgttaaatacgaataataaagatattgttatctctataaaatacttaccaaaaccacagtcaaagagtattagaatgtatgaaatttcagatgaattaaataagttattcaacagaaatataaaggtaacagacagaaaattaaatataacaaagctagaacaaagtattaaaaaagaagagtcaatttatgtattgaactttacaattacactaaattatctggatagtgtatatgaagaagatgtagtatatgaaaatatggaagaaatcaatttaaatttaggagagtgatagtatggctataggattaccaagtatcaacatatcatttaaggagctagctacaactgttaaagaacgttcagctagaggaataattgcaatggtgcttaaagatgctaaggcactaggtcttaatgaaatacatgaaaaagaggatataccagttgatttatctgctgaaaataaagagtatataaatttagctttgatgggaaatgttaacactccaaataaattattagtttatgtaatagaaggagaagcagatattcaaactgcattagattttttagagactaaggaatttaattatctatgtatgccaaaagcagtagaagctgataagactgctataaaaaattggataattaaacttagagatatagataaggttaaggttaaagctgtattaggaaaagttgtaggaaatcatgaagggataattaattttactacagaagatgtgttagttggagaaaagaaatacagtgttgatgagtttacaagtagggtggctggacttatagcaggaacacctttaagtcaatcagtaacttatactaagcttagtgatgtagttgatatacctaagatgacgaaagttgatgcagaatcaagggttaataaaggagagcttatacttattaaggaagcaggggctataagaattgcaagaggagtaaattctttaactgagttaacagaagaaaaaggagaaatgttccagaaaataaaaatagttgacactttagatattatacatagtgacataagaaaggtgataatagatgactatataggaaaggttactaacagttatgacaacaaatgtttattgatagtagctataaaaagttatttagaagaattagaaaagtcagcacttatagaatctgattctactgttgaaatagattttgaagcacaaaaatcgtatttaaaatcaaaaggagtagatttatcttatatgacattacaagaaataaaagaagctaacacaggttctaaagtatttttaaaagcaaaaataaaagtacttgatgctatggaagatatagatttatcaatagaaatataggaggattattaatatggcaaatatggaagctagaaatgtaatgagtggtacttggggagaactttggcttgatggaaacaaagtagcagaagtaaagaagtttcaagcaaagatggaatttacaaaagaggatattataatagcaggtcaaatgggtactgatacaaagtatatgggatataaaggaaaaggttcaataactctataccatgttagttcaagaatgcacaagttaattggagaaaagataaagagaggttctgaacctagatttgttgctatatctaaattaaatgacccagattcttatggagcagaaagaatagcagtaaaaaatatagcatttgatgatttaactttagctgattgggaggttggagtaaaaggagagatagaagcacctttcacatttactgagtatgattttcttgatataatttagttttatatttggttttatactgatatttagtagatatatacttaataaatttaggtagttaataagtaaaaaagttagttgattgaatttgattgataaaggagcaaataataatgaatgaaaatggattatcaaaaaatataaacatagtagatttacttttaaatgcagatacagaaaacttagaaagaccaagtactatagttgaacttaagagattatcaactatatttgggcaggaatttaaagtaatgtgtagagctttaacaataagtaaagatgaagagatacaaaatacttgtcttaaaattgatgaaaatatgaaaacggatatagacttaccggagatgcagatgcttacaattatagaaggtgtttgtgatttggatggaaagcttttatttaaaaataaggaactaatggataaatttaaggctccaacaccaaaagaattggcaagaaaactattattaccaggtgaaattaccaacctatatagaatacttcaagatgttatgggttatggtaaaaatgcagtgatagaagaggtaaaaaactaatagggacggataccaagactacaataatgtactattattggaagaaaaaaggtataagaccgtcccttttttatgcaatggataaaggcgaattaaagcttattgaagcttttttcgccttagaaattgaggaagaagttgaaaaaatgaaacatggatatggagtgtgtcctttgacaggaggtggtatgtaatgggaaatgtgagagaagaaggtataaatatgtatcttacagataattacacaccaaaaatgaaccaaattatatcagtaactgataattttaggagagcaactgtggctgtttcactttccactaatgtaatggctagtagcataaaaaattctattggaagtgcaagtagtagagtaaacagtttaaattcctcgttaagaaaagttcaaactactgctagtagtgtaagttcaactatggcaaaattaagttctagcataaatgctgtttcaggagttattggaagtttaaatggaagtattatgagactagcaataactatagctatgattattgattattttaataagttgattcaaaagaaaaatgagtttaattcaaatattatgattatattaatatttaaagctaaaagtgatgaagtagaaaaaactaaaaataaattacttggaaatttaaaaaagattggtggcaagatttggaatatcgtaataaaagcaaaagatatgactaagagagtgataagtagtatcttgggaaaattaaaacgagtagagaaacgtccttatcaaggaagtattaatcttaaagatatggtaagtagtgctatggctagaattttgcctaagttaatgttgtttaaaaatactttttggagtggtgtaatagctataaaagatatggcaagtagcattataagtaaagtatttcccaaattgagattgtttgcaggtaaggtatggagtggtgcaatagctgtaaaggatatggcaagtggaatacttggttcgataaaagggaagatatctgatttgacaaatggtgctactataggtgtcgctgtgaaaaagggtgttgacttacttggtcaggaacaaaatcagaaagttgttctagaaagtgtaatgaaaagaaatactggaaaaactagccaaaaagatgttgataagtattatgacagtttagtaaatatggcaaatgatacgccttttgaccctgaagatgttgttgcaatgggaactaaagctaaaatgattagtaatattactggtggcaaaaaagaaaaagatataactcaagctatggtagatgttagagctttaaatatgaatacaagtagtgaacaagatgtatcagcagctttcttaagtgcagcaaaaggaaatatggaatctcttaatactctggtaggagaaaattataaaacttttgatgaagcattggaaggcataagtgtaaagcagatggggttagctaaagaaatgagtaatacaataccaggtataatatcaggagctcaaacaagcattaacaatggtttgaagagtattgttaaaccttttgatgatattttaggtcaaggactaaagaaaataaaaacttttatagaaagtggattagggaatttagctggcttatctgaaaaaatggctggtaaaataggcaatgtaatgaatggtaagataattattggcaacaaatatgaccagatgcaatctagaagtgtaaaaaatggaaaagagttttctgattctactcaatatcgaatttctaatgaggctgaaaagcgtaaaatgatggttgaaaataagcaagaacgttttgaaaatcatgcagcaacaatgatagggaatgcaccaaaagcaattgttaacgcaggaagtacactattacaaaatattgattttacagcattaatagattcactacttccagtagtaaacttagtaaataatttactagatagtataaacaataaatcaccaattgcacaaggattaataagtatatttggtacaatagtaactacagcattccaactaatcggacctgtagttgaagctgttagtcctattatcacaagaatttttacttttttaggtgaatatgcacctcaaataaacaattttatagagacactgggtgttatttggaaaactgtatgggagaccttaggacctctgttggaaactggatggaaaattatagagccaatattgggagctttttttaacatattagataaagtatgtaaaatagttaaagatatatgcaaatggtggcaaactatgattaataagataaaaaatggaagcatcacaggaacagttttaaatctagtggaaaagagtaaaaaaaattacaaagataatccatatgctggaacaaaggctggtgattctggtaaagcttattcaagtaagaaaggtaataatgcatttggattgaactatgttccttataatgactatcaaaccagactccatgaaggtgaaatggttttaactaaacaagaagcaaatcaatatagaagcagaaaaaatggtggaaatataaacatagctaagttagctgatacaatagtgattagagaagaagctgatatagaaaagataacatcaaaattagttgcaagtatccaattggcacagttagggggtgtcttataatggaaatgtggcttagacaagcagaagatagatttagatttccagtatttccatcttcctttagtattaatggaaaagctgctgtaaactcttctagtatactcaaaataggtgaagtagcaacttttggtggtgtagctcttaaaagcatttcaatatcaagtttttttccaaataaagactacactttctgtgactatacaggttttccatcaccatatgattgtgtaaataagatagaaaaatggatgaaggaaggttttatattaagatttacaattacggaaacaaatataaatatggaagtcataattgaagggtttagttatgaagaaagagatgggactcgagatgtatattttacattagatttaaaagagtataaaagaataaagataccaaaagtaactccaaaacaataactattatagataataagttgtaagtaactgctgatagaattaaatgaaaaggcaggtgattttttattattaagatttgggtacacataaaaaacggaagtatatatgacataactgacatagtagacaaggtatcatggtcaggtgattataaatctccatcaaggacactagagttttcaataatacaatcatcatttgatgtaaatttccaacaaatcgatataccaatagctagtacagtctgtttctatgtagatgagaaagaactctttagaggaatgataattaataggtctaaagattcaagcagtaatgaaattagttttgtatctaaagatatgggatttttacttacacaaagtgaagtgtcatacaattttaaagataagttagttgaagacatagcaaagcaagtatttgctgaaaataggctttcagttggaacaatagcaaagaccaatgtcaagtatacaaagatgtttataggagtaaatggttatgacacaataatgagtgcatatacagaggcaagtaaaaagacaaagaaaaagtatatgatagaggctaatttagataagtttaatgttattgaaaaaggaactgttacattaagtgttatgtttgaagagggatttaatattataaataccaccttttcggagagcatggaaaatgtaaaaaataaagtaatagtggtagaccagtatggaagcaagattagcgaaaaaatagataatgaaatttttaaggaagtaaatgtaataatgcaaaaagtaattcagcaacaagaaaatcaagatgtagatattgatagcgagtttaatgggatagaaaaaagctgttctcttaaaggttatggagatgtaagttgtataactggtagaggagtaaaagttaaagattcttatacaaagcttgtaggactattttatatagatacagacaaacatacttggcaaaatggagaatatcaaattgagcttgaacttaattttcaaaatcttatggatgaaaagtcagcaggacaggatgaacctaaggaagaaagtaatttagggggagaagattatgcaggaggaaaagagtttacagcagaatttacagcttactgtcctagaaaagaagaaggtggagatacagattgtagaaagaaaaaacttgacccatctaaaaaaacttgcgctgctcctatggttggtaaatatgagcaaacttattatacaaaagagtttttaaataaacatcctttattgaactatggagatgaaatacaggtaattacaggagtttctggtcgtgatggagtctataaagtaaatgacgtaggacctgcaataactatagaaaaaaatggaacataccatatagatattttatttggaaatgttgaagaagctagtaaatttggaagaagaaaaggaaaaattattattggtggttattctggtaatgtatctgataaagctaaaatagtaatatcagaggcaaaaaaacatctaggtaaaccttataaatggggtggaaatggaccaagtagttttgactgttctggtttaatggtctactgttttaaaaaagttaatgttagtttgccaagaacgtcaaatcaacaatctaaaaaaggcaagaaagtagaacaaaaaaatcttcaagcaggagatttagtattttttcataatccagtcagccatgttggattatatataggtaatggagaatttttacatgctccacaaaaaggtgatgtagttaaaataagtaagttaagtagtagaagagattttaatacagctaggagagtattataaaaggatggtgatataatggctaatccaataaatgaatttataggaataataagagaagaaggaaagtatcataatcaaccttctttttttattggaaaaattaaaagtaaattaccagatttaaaaatagagacaaataacatcatattagaaaaagaagatattttgatagatagttggatgattgatagacagctagaaacatttgacacagaaacaaatcaagaacaccagcatgaagtaaaaaatccttttatagataactttgaatctggggatatggtaataatgtttagaataggcgaaaaatttgctgttgtaagtaagttggtgagcttataatgagtacaatatttccttttataggtgtcccagaggattatatcttacctaaaacagaagaattgccaatctttcgtgaagtggcatgggattttgaaaaagatgaacctattttagaaaaaggtgactttaaaataattgaaaaaaaagaagccttaaaagtttggatatacaagtgtataaagacaaatagatatgaacatgagatatactctttagaatatgggacagagctttcagaactaataggacaaaaatatacaaaaggtcttacagaaagtgaagctagtagattcataaaagaggcccttctaataaatccatatatattagaagtaaacgtaaaaagtgctaactttaacagagacgtattgagtgcaaatgtaaaagtatccactatctatggggaggtggaaataaatgtatagtgaccagacatatgaagtaataaaaaatagaactcttgaaaatattaatcttgatatttataaaggagaaggttcttttctaaacaacatggtatctggaaataatctagaactttcgaagatatatctagaactttcaaagatacataaaatggcttttatacaagacacatataaccagtttcttgataaaagagtcaatgaatttggtgtatatagaaagttaggtacagagtcaaatggagaagttgaatttattggagagaaaggaactgtaataaataatggcacaataatatcatatagagatttactatttgtagtaataaaagatgtaactattggtagtgaagaaggtgacaatagcccagttcaagctctggaagttggtaagaaatataatttacctacaaattgtgaatttaaactagttgataatatatctggagtaacaaagattactaacacaagaagttttgaaggtggtacagatatagagacagatgaagaactaaaagaaagattttataaaatccaaagaaatcaagctacaagtggaaataaagctcactatgaagaatgggctttggaagtagatggagtctataatgttaaggtttatccaagatgggatggtccaggaacagttaaggtcttgatatttggggaaaataatcaagctgttgatacagaaacgattgaaaggtgtcagcaacatatagatgaagagaagcctattggaccaactataacagttgtgacaccattaccaatagaaataagtataagtgcagtaatgaaactagaagatggatatacattagacaatgtaaaagaatctttcctagaaagtataaatacatactttagagatattagaggagagataatctatacaaaagtcatgggaatacttataaatactactggtgtacacgatttaagtaatctacttataaatggaagtacagataatataactattaatgaagataaaatacctagtgtaacaactgttaattttagtgaggtggaaaatcaatgaagctaattgataaactaccatcatttgatagaaattacattgtagaggagatacaaggtgcatacgatacagaattaaatattcttaaagaagatattgatgatacctttaaccaattatttgttgatacagcgacatggggattagatatgtgggaagacatactctgcattgaaaaaaaagaacttgattttgacacaagacgtagcaatataaaagctaaaatgagaagcagaggtactagtactattgaagttataaaaagtatatgtgaggcatatacaaaatcagaaacagatataaaagtttatagtgatgaatttacattcgtattgagttttatagcaaataactgtgactataaaactcttttagattgtagcgagatgattgaaagagtaaaacctgctcacttattacactatttagaaccaataatactagataaaagtatggtctattgtggtggaggtatggtatgtagtgaagaggtaaaagttcatccatactttgaaccaattataaaatgtagtgctgttgtaaactgtggagctggaatgttaagtagagaagaaataaaggtttatcctttaagcattaaatgcattgaaaataattgtaagattaatatagctattgcaaatgatacaggcgtagaaaatgtagtagtttatcctaaatcggaggtggtataattggaagaaaaattttatataatattaaccaaaattggtagagaaaaaatagcaaatgcaactgcactaggagagcttgttggattaaccaagtttcaagttggagatagtaatggagaatattatgagccaacagaggaacaaactgctttaaagaatgtagtttgggaaggaaatataaattctctaagaattgatgaaaaaaatcctaattggatagttatagagactattttaccaggaacagttggtggatttatgataagagaagctgctgttctggataatgagaataatataatagctataggtaagtatccagagacgtataagccacgtgctgaagatggcagtattaaagatttggttgtaaaaatgattttacaattgtccaatacttcaaatgttacattagaagtagacccgacgttggtttttgtaactcaaaaggatattcaagatttagatgataagtttgataaaaatataaaagaaataaaagtaaaaattggagatacagatatattaactacagattctaaagatttatcaggagctataaatgaggtagttaaaaaaatagaaaatatatcttttgatgatgttataagtggtcaaatacaaactgatatatcagtattaaaaaatagctataacaaattatctgaaaaagtgctagatatattaatatacctagaattagagtcagaagtaactgtagatgaggctggttattggtatgatacattagcaaatggaaataacatagtagctatagaagggcttaagttagatttaaatagaaaatgtataacaggtgaaattggtaatgtgatttttagagatgtagtattaccatttagtgcaaatagagttagatatatacatgatatggataataactttgttgagacaaaatctagtaacacttatttaaaagaacaaaaagatataactctaagtaaatattcatatgaaataagataaataaaggaggtagtactaataatgaagcaaaataaacttttacagcgtggtgcttattttaatgataagaacatattgattgatgattttgataaaagatataatgattatgattttgtagaattttttactggtataagtaatagtacctttggtttaaaatcagatggtaatttatatgcttgtggcgataatacaggttttcaactaggacttggaaaagattcgtcagagagaaggatgtttagtaaagtaaaaattgataatgtaaaatatgtatcttgtggttcaaaacacagtgtagcagtaactaaagatggatttgcatatggagcaggaacaagtaatgtaggtcaattaggtgtaattgagtctacagtatattatgaatttactaagctaccaatagatgatgtaaaaactgttgcatgtggttatgactttacatttgtgcttaaaaatgatggaacattatattcagcaggtttaaactcaagtggtcaacttggactaggtgatactaacaatagagctacttttactaaagtaaatatagatagtgtgaaagatgtagtgacttataatcaatctgtatttatcataaaaatggatgggacagcacatgcatgtggattaaattcaaatgggcagttgggaattaatagtactttaaataaaagtgtatttaataaaatagaaggtatggataatgtaaaacagatagcgtgtggtagtagtcatacaattcttattaagaatgatggaactatgtatactacaggctataatggagttggtcagcttggtacaggaaataataataattcaattgtatttactctttctagtataaataatgttaagtatgcttcttgtggaaataatcatactatgatattaaaatacgataatacactgtttagtacaggacaaaacaattatggtcaactagccaatgccaataaagatgtagcatcaagaaatacttttgctaaggttaatgtagaaaatataaaagatattaaatgtggttctcaatttaattttttaataaatggttcaaaagagatatttgtatctggctgtaatttagcaggtcaacttggttcattttttcatacaacttttctgtatgagttttcaaatgtgcaatcttcaaatttagataattattcaggtttattggttaatgatgattatttatatgttacaaaggacaatagtgaatttttaaatgtaaagttaagtgataattttcaagattataagaagatagagttaacagatagcaatatgtttattgttatgaatgatggtacattgtatgcttgtggtttaaataattatggacagttaggattgggagatactgttaacaggtcagttatgactaaggtggatatagataatgttttggatataaaaggaaacggaaactcaacttttgtgcttaagaataatggaacattatattcatgtggtttaaatagtaatggacaattgggtttaagagatgaagttaatagaaatatatttacaaaaatagaaatagagaatgtaaaggatttttgtgtaggaagcaattatgtcatagctttaaatcactcaaaagaagtatatggatggggaaataatccttataataatatagaaaaaacttctaattatccatataagcagggaataagtaatattgaaaagatagcagcatatgattattctgtatatatgataaacagtgaagggaaactatatgtttctggatacaattataattatcaattaggtaaaggaaataatagtaaccaaagcaaagcattagtatctcaatgtagaacaaattcaacatcttctacatcaaatggacttagaacgttacctaaaataactaatgtttttcctttttatgatggttgtgcaataattgacgaaggaggttatgtttatttaacaggatatcatggatatttaagaacattaaatagcagtccaagtatatctgattattcaagatatggaacttttattgaggctacaaattcaaatcataatacttattttatacaagagactgattttagtggaattgaaaaagtaatagggatgtcaaataatatattattttttaagaaaggaagttcatatattactggatatccaaaaacatttggctcaaccattactggacatagaagttatactagtattaattctgagagttctaatttaggaagtaattttataatatatcatagtaattccaagttatatggaaaagggattgctaatagtgggcaatttgggaattcaacaaatatagatggcacaagtaactatgatacaggattaaaagacataaaagatataattgtaaaaggaaatactgtagtagtagtagataaaaataacaatatatatgtaacaggaatgaatcagaataacaaacttgggataggggaatataacaacgaaccagtaaaaaaattcacaaatataactgaacaatcaaactcatttatatttatggatgatataaaagaaattacaacatcaagaaatacaatgtttatagtaaaaaatgatggaacagcctatgccacaggaaataatagttctggacaattaggattaggtgacacaataaatagaaataagttcactcagataaaccttgataatataaagaaaatatcaacaagtatagatggtaacacaacatttgcaattagaaatgatggaacactatactccacaggattaaataccaaaggacaactgggattaggtgatatagtaaatagaaatacatttaccaaagtaaacatccaaaatgtaagagatgttgttttagggactactcactcgcatgcaatcaaagatgataacacattatattcatgtggagaaaacactcatgggcaactgggcttaggaagcgaaagcaaccatccagacgtattgacatttactgtaaacaatataactaatgtaagagatgtgtactgctcagatacaacaacatttattgtaaaggacacaaacattgcatattgttgtggatacaataataattcacaactaggtatgggaaatactactgaccagtatagttttataaagtgtatggaaaatgtaaaagaagttataccaaatgaaataaatacctatataataacaatctataatactgcatatagtacaggtttaaatactgattattgcttaggtctaaatagtaatagcaatcaaagttcattttctgaaattccaatttcaaatgtagtaaaagtagctccaaacagaaataatgcagtacttttacttacaagtgaaggggatgtatatactgcaggcaaatgtagtaatggttcaggtacaggaagtgagactccagagaagattaaaaaaatagcatcaaaggcaaaggatattggaatgaattatagatgtggacattatgtaagtgataatggagacctatatggtacaggttttaataataatggacaattaggtgttggtgatgtaacaaaaagagatacatttataaaaaccaatacaagagtaaagaaaatacttcctttagaatatgcaaatatagcaataaaagatactaatgatatatatatttgtggattaaataactatggacaattaggtgttggaaatagatacgatagtagaaataatgataatagaatatttaattataagcatatgaattttgtaatgggtgatttgacatctattaaaaacagacataactttatacttctaaacaataagatagtgatacctaccacaaaagacatagattatggtttagtattaggaaatttatacaaaggagacctttatactgagcttccatatgaagatataaaagaagtatctatttctaagactcatattattatattacttaatgatggaacaatgtatggatgtggtacaaactaccatggagaattattgcaagacttgtctataaatcaagtggatgaatttgtgcagattaatgtatcagatgtaaagcatgtttcatgtggagataactttacttattttataaaatctgatgatagtctttggtctattggtaaaaattccgaatatcaattaggtataggtcacaataatccagttactgaattacaaagaattacaactatatctagctgtaaagaagtacattgtggtaaaaactatacattagtagtaactacaggtaatgaattatttgtacaaggatataatgataagggagctttaggattaggaagcgatagtgaaaatactataattaagttctttacaaaagcactaacagacataagagaaataaaatcttatggaagtgaccatatattagtacttaaaaatgataattcagtatgggttactggaaaaaatagggatgtatataaaattgaacaaccagtagaatttttaaaagaatttactatagtacctatttctgaagatgtaaatacagtaaaggatgtacttgcaacagacaatacattatatattatatcagaagtaggaacgacaaatgctgctatagaaattactgaaaaatcaatttcatcaattaagataaaaatacaagaccctaataaagatataagtagaatagaaatgcttataaatggtgaaagtgtaaaatctgtaagtgatttaactactgaaaaaatatcctttgaagtaccaccagataaaattaaaataggagagaataagatactatttagagcttattgtaaaggtgatgatttatatgcatctttatttatttttaaagagagtactggaaattctataattaaagattcttatgttatgataggtaatagaatgtacaaggtagttaatacaacatctaatgaacaagatattacaattacactagatagaggacttgaagaagatttaaatcttggagaccctatatatcaattaataaataaaactaaagttcaagtaaaaataaataaatctgacttattcaaagacatgaaactagttgaaatcaaaaaatcagactcaagttatcaagaaatctatgaattagaagaagccaacataaaaagtgctcagcctaaaatcatagtagaaaaaggagataaatggacagctataaaacgtccatctatgatttttagatatgatgctgaaaacaacgagccacaagcttaaaatggaggtgtaaaaattgtttaaattcgataaaaataaaatagaacaaatcaaacaaggtagaaaagtagaaatgcagtataaagacatttcagacataagtataggtcaagcaaagcaagatgatgatataacaaataattttatagcaaatgcagaaatatatgagatgttgttaagtcaaagttctgtcaatgaagcaagtaatataagcacttttagtgtaagaaaatctggaggtgagagtggaatggtagaagtatatgtagctttaattttaagaggcagaaaaacaatagaagaagtaccagcagtaattagagagcaagttagaattagatgtaaagaattagaaataccagttgaatagtaaatttagaataactatgtattagttattttttttatgtaaagtacaaggtcttaactttaataagtaagccttgtacttattttttgttatattagaaattgtatatatatttattatttattcaatctataaattaaacctacaatttaaagtacagaagattaaattgataatcctgaaaatataatattgcatgatgtaagaatataacaaaaattaaagctataagtataaaaaatttagacaataggaggctataatggataaattaataaccgaattgagtagtctgggggcaataggtatactatgtgctctattatttaaaaatactatgcaggagaaaaaagaagatagagacatgtataaaaaaactgtagaaaattttatagaattatctacacaacaacaagaaataaacaaaaatatacttgttcaaatgggaataatgaaaacagatgtagaggaaattaaggaagatgttactgatataaaaggtatgttacaaaacggtgtataacatgaaagtagcagtagcaccagattatatattattaggaaaagataaagtagtattgtagatagtgccctattttattgagaaggattttatattttaaaatattaattaaaaaaagtaataaaaataatatataaaaataacatataaaaattcaaaaaggagttaagcttaaatttgattagaaaaaatcaattttaagacaactccttttttttattaaattattgtctattaaccaaaatagctattttagcatctggattataacttatctgaaccatttgatttttcttaacatgttcaaggtcttcaccaccataagctatttgtaacttaactggtaacttaccttgttttataatagcaacgtactcttttttaccttttttctctaaactaatcaaattgccaacataaggtttaaagttctgatactttttactagaatttcttatgtagaagaaagcaccaacagcaataactaaatttatgccaagtgtaacccaagaattgattttaagcatagctccagcgattattatcacgaacattaaaacgataggtaatatagctttcttaagaagcaatttacccattatttcattagcctttttctcagggccactcatagtttttgatctagcaaatgattgcgcgaatttgtctcttaagcccattttatcctcctaattttaataaatatttagttataataacgagatattacttgaaactaaaaatttactacatttatattatgtttgacttttgtataaataattacattcaagtaaagcaaaatatactaattattttatcataaaattataaaaaagaaaataaatgaaataaaaatattagaacaaagaaatgatgtaaaatcgtatcaaaagcaacataaaaattatttatctattttctcatctttatttttgttatactcaatttttcctaaatccttctctttttcatattcatgaagttttaattcaatcataccttctattttggctttatcataatcatttaactttctaaagttgtttaaaagctttatttcattagagtttatgctattaagtggatagtttgaggaggaatcgcaaattaaatctgatttatgtgatagattatctccatttaatagccagtctactgaaacattaaatatctcagctatagattttaatatttcataatttggttttctaatgtttctctcaaatttacttaagttgtcacagcctaacatttcttctagttcatattgtttaaggttttttgcttttctcaaataaacaattctttctcctaaagtatccataaacactctccattcaattaatgtcaaaaagactttttaagatgtaaatagtttcaaattaaaggtcaaaatgacataaaaaccattgacttaaggtcaaaatgactttataattaacttaatgatacgaatttacatcctaattttagcacaaagtaatcaaaaaatcttatttagtattaaataaatttatatacttaatatgtgtacatattaaaaatatatactaaatagagggggtgcgtaagctaaagtaatataaaagtaaatataaatcacttagaaaggaagttgataaatggatgctcgaaaaaaatggataccttttttgggagtgcaagtcaagcaaagacttattgaattaaatatgactcaaagggaattagcgaagaaaataggtgttaatgaaaactatttgtcagctattttaaatggaagaagaacaggtaaaaaatataaatcatcaatttatcaattacttaatatagaatattcagaagatgattaataaatagtatataaagtaggtgaatattcttgtgtgcaaattggattcagatggggttatagagtgttgtagagcaattgatgattttattacagcacttagtaatataaaaagcttaaatatggaaagattaaatactttaactaaatattctagtacatgttcaatccttcttaaagaggggaattatgaaggatgtacaattgtgtatagaaagatgttggaagaattaaaaacatgagtaatgcatttcttaggaatataaattatacatagaaatgtattatatttttcaaagtacttaaactaaaatatggataagataatctaaatattataaatgtgcttgaaattagactatacttgtttttaaataatccaatatccatattttagtaatatactacaaaaaaagaaggttaatagatgatgtaaaatcgtatcaaattatgtatgtttaaaccattttatcttcattattattagaggaatgcttttttaagtctttatattcagatatcttaagttcaagtattccttctatttttattttatcacgttcgtttagttgtctgtatagatttaatatcatcatttcatcattagtaacatgtaagtaatcttctttatcttcttttacactactattgacatttaccttctctttaccatagagaagccagtcagtcgtaacattaaaataatcagctattgacattagtatatcacaattaggttttctatctcctgtttcatacttgcctaagttttcaaattttaaaatatccataagtttgcgctgagtaagttttttggagtttctcaaataagcaattctttttcctaaagtatccacaaaatacactcctttctttttatgagtaatgtctaaatgacatttgaaattaaaaatatataaatttataatataaaactactaaattaaagtctaaatgacattttgcttaaattaatatgctcataatatgattttaacatattatagttgaaaatatatggtttattttgatttgtatatataacaatagatttaattgttataaaaatgtaaaggggtgtatgaatagattgtataaatttatttcgataaactaagattgctttttgattgtctgtaaaagagaaaaagattaagataaaaatagtattatattgtaatttatattaatcaattacaaagattttatgaatttattctttagggtaaaatatttaagaataagataaatttacaatataatactataacactcttttatctagttttattttctttatagaacaataatattataaatgctagtagatttacacagaatactgttatatacatctgtttgaatcctgagtttagagtagattgtagtgtattttctatttttgttctattattttctatggaatttatataatccaattttgatttatcaaaagcctttggtatttcagtttttacctcttgtgtctttgctaaaactgcttggagtgattttttttgctgttgcattgtatcaaggcttttttccatgtctttcttttggtttatagaattatttaacttgctttgtagctctttcttttgagattccattgatcttagttttttacttaattcgttcttttgagttttatttttttgtaactttgtatttaagtcatctcttgtcttttttagttgctgtatttgagcatttaaactttctttttgttcatttacatttggtttattctcgctggaattgttattcttattttctgtagaatcattcttagtgtcgtctgattcagaattactggtattactctggttttgttcatttgagttattttcgttatcagtaggagtcttttctgtagtaggtattttattataagcagttgtaagttccttgatggcctcatcttgtttttcaagaccttgttccataccttttatacctttgtcaacaccagcaatacctttttttacaccatctattccttgattaataccagctctagcttttaccatattgtcaataccagtttgaactcctttaataccactatttagtttattttcaccatcttcaataccgtttattccactttgtgttccatctattcctttttgtacatttttctgtattttagtaattatagatggaactttttcatcaaacattgttgttgatatttcttttgttatattggtaatgttggttgtatctgctgactgaactttattaagtaaggattttggaagtttgccacctgtcatgtccatatttatatttgaagtatcattcatatttgggatagagacattttttaaattttttgccatttcagggtctgattttaagtcatctatcatgttttcaagttcttcaagttgaactattttaggagttgagggctttccaactaagtccataatattatcttgcacagataatcctgcatgtgctataaatccaatcattatagctggagaaattgaagtaccaattgagcgtatcaaggataatgttgcaagtgctgaattagattcttctaatcttgtatttgataacatcatatagtttagaggagttcccatagtaaagcccattcctaatcccataaatattaaacttacacatacactaaatacagtattggtttttagagcaattaaaactaggtaaagagagcctatcatagatacagaaaatcctagtaatagtattttctttgccccaaacttgtcaataagtcttccgcttaaaggagcagcaatacctgcaaataatcccaatatagctacaaaatatccaccagaaccagcatttatctttaatgcattttcagcatactgtggaacgaataccatacccatcattccaataccaacaattaaagataaaataagtactatcaatattctcggatttaaaaaatattcaaagcttaaaatagggtctttagctctattttcaataaatatgaaaataggtataagtacaataaatgtcaataagtatggataaactgatatatcttgtatagaatttttaaaattaaaaaagtctatattcataagaccatataatagtgatacgattatacatatcaacatcaatgtaccaagcttatctattttttctttagattcagacttattgtttttaatacagaaaactccaccaataagtatgattaaacaaattggaaggtttacaaaaaatagccacttccaattttgagttccaaagatacttagaattgtgctaccaatgcttgaacctaaaatattggcaataccatatgttgccccaactaaacctaaagccatgcctcttttattttctgggaaggtagttccaaattctgctgtagcaattggcatgattccaccaccaccaattgcttgaataacacgaccaattaataaaatatagaaattggaaaatagtgatgataatccacatattaatgaaccactaccaaatagaaatatactaactagatacacatattttcttcctattttatctgctaattttccagagataggaattacagaagcgtatgttaatgtgtatatggtaatcatccaaattcccgttttttcatttactccaaggctattttgtataatcgttcttgctggtgatactattccagtatcaatagctcccataaatatacctaatagataaagtgtaagtactaaaaatatttttggattactgtccttgttcttaatactagtattatgattcaaggtaaacaccaccttaatgtattaatttttcaatatagggttttaaatcttcaaattctatatgaagatatgttgaatatgaaaaaaacatttttattatgatattgcatactaatttgtcattattaaaaaaactttctttttctaaagcttcatatactttatttgaaagctgttcatgaaagtcgtctttgtgttttttcatttcaaaaaatctctctgtttcaaaagtgtttaaaaagtcattgtattggatattatgaactttgtttataaaatttcttatttcagtaaaaataatgtttagtttttttatgtaatcttcagtgtttttattggagtattcaattcgccttatcaataaatcccattcagattttgtgatatattctattatttcttgttttgaattaaagtaattatatactgtacctgcacttataccacacctttgagctattttccttatgctaatattcgagtaatcttcttctaaaatcatatcccgagatacttttaatatatcttcttttacattttctaaaatctttggcatattaccacctcttttattaaaattattatgaacactgtttattatactcctttaaaatttattaatcaatatgtaagctataatgtataatattattatatagatatgatagaaaataagtgtctttttataaatatctattatattaaatttgtacttaagtatgattatttattgaaatatgtgatattaaatttttctttttaataaattaaatattatatgataaggagaatatggtgatggaaaagaagtatgtaatggcattagaccaaggaacaaccagttcaagagctatactatttaataaaaaaggcgaaatagtgaaaattgcacaaaaagagttcaatcaaatttatccaaaagctggatgggtagagcatgaccctatggaaatatgggggtcacaaagtggtgtaatgagagaagttatagaaacagcaggtataagaccagaagaaattgcttcaatagggataactaatcaaagagagactacggttgtttggagtaggtatactggtaaacctatttataacgcaatagtatggcagtgtaggagaacatcagaaatatgtgatgaacttaaaaataaaggattggaagaatcaataaaagaaaaaacaggtcttttaatagatgcatacttttcagcaacaaaagtaaaatggatattagataatgtagaaggagctagggaaaaagcagaacaaggagagttattatttggaactatagatacatggttaatatggaatttaactcgtgggaaagtacatgtaacagattactcaaatgcatctagaacaatgatgtacaatataaatgatttagaatgggatgaggatatattacgagaattggacataccaataagcatgttgccattagtaaaaccttctagctatgtttatggtcatacagatgagcgcatgttatcaggagctaaaatacctattgcaggatgtgctggagaccaacaagcagcattatttggtcaaaattgtgttgaagaaggtactgcaaaaaatacttatggaacgggttgtttcttacttatgaatacaggcagtaacatagttaaatctaagcatgggttacttacaacaattgcttggggagttgatggaaaagtaacatatgcattagaaggaagtatatttattggaggagcatctgttcaatggcttagagatgaattaaagataattgaatctgcaaaagatagtgaaatgtatgcaaatagggtagaggatactaatggtgtatatgtagtgccagcatttacaggtcttggagctccatattgggatatgtatgctaggggttcaattttaggacttacaagaggagcaaaaaaagaacatatagtaagagccacattggaatcaattgcttatcagacaaaggatgttttagaagcaatgcaaaacgattcaaaattaaaactaaaatcattaaaagttgatggtggagcaagtaataataattttttaatgcaatttcaatcagatatattaaatgtagatatagatagacccaaaatagtagaaactacagctttaggagctgcttatttagcagggttgtctgttggattctatattggaagaaatgaaattacttcaaagtggtcagtagaaaaagagtttaatccaaatatgagtgaagagaagagatgtaaattatataaaggatggaaaaaagctgtatcgagagctttaagctgggaaaaagaagatgaattggatatttaaaaattaatcaaagttaaatttatttgaatttaaaaagagctttatgtaaaatatgaagctctttttttgttgttaattttgcatttttatataatcatactaaattatataatttatttttcgttttcatataaaaacattggtatagaattgtaaatgtgttggtcaccaactactaagagaatgtctccttctaaaaattcaatatatggtccaggagatattataagttcttcacctcttttaattgcaactattgtagcacctgtattttgccaaaatttagtttgtgcagctgtttgaccaatatatttgcaattagaatttatggtgaactgaacgggcactaaaggattgattatttcaagtctgttggaatagtctaaaattttatttatagtatctaatatttcattttctaaattagatttagtatctattaaattataaagtgttgatttatatgatgatatatttgtaatatctctatatttttttataaaagaagaagctttgtctggagatagtacaataacacctttaccctttatgcttttaacaacgccaatgtcctctaaaattttgacagctcttcttatcgtttctggagatacattgtatttaccagccaaaacagagcgtccaaatagtactgaatcctcttgtatttcacccgtgtatattttatttgcaatatccaacgctattttttggtatattggcatcgtatagtttttatccattgtttttcccccaatacaaaatttatgttaaaaaaatatataatcttaacaatactattgtataatttataggtttatatgtctacaatatgtacaaatattgtgcatgttttaaaataatattttaacatgcatttagtatacatgattttattatacttaaaactatataaagaattaattataaaaatataaagatattttacttacaaagaatgataattatatagatgaaagaaacaaataaatgaagaaaaatgattctgtcttgcatataaagtgattaaaaatgaaaaatactttaaaaatgaaggttaaggcccttattttaagtgaaaataattaattattaactaaaaaatggtaaaaagattttttgaaaaagaaatacaaatgaatgttcaattaaaataattgcaaaaatattccttaaatggtaaaattatattaattaaatgcaatagaatagttgcaaaaataaaattgaatacaagtgataaaatatttcatgcaatatataaaataaacaaaatttaaaaattaaaactacttattctatcaaaatgttagcaaggagggggtcataaattgtataaagtagatttaaatagtgatttaggagaaagttttggaacgtataagattggtttagatgaagaagttttaaaatatatttcatcagctaatatagcttgtgggtttcatgcaggtgaccctagtcatatggaaaaaacagtacagctagctaaaaaaaatggagtgaaaataggcgcacatccaggtttcctagatttaataggatttggaagacgtgagatgaaaataacaaagcaggaagctaaagattatacaaaatatcaattgggtgctttaatggcatttgcaagttcaaatggatgtaatatacaacatgtaaaaccacatggagcattatacaatatggcagctaaagataaagagttagctatggggatttgtgaagctatatatgaagtcgataaagatattatactgttggggctatataatagtgaaatgataaattctgctaaagaaattggacttaggtttgcaaatgaagtatttgcagatagagcttatgataataatggttttttggttccaagaagtgtagaaggagcagttatacatgatacaaaacatgcaatagatagggttgttaggatggtaaaagaaggaactgtagaaactttaacaggtgaagttatacatatcaaagcagattctatatgtgtacatggggacaatccaaaagcaatagagtttgtcaaagaaataagaaagcgttttgaattagaaggtatagaagtttgtccattagaaaacatagaagtttgttcgtcagagaacatagtataagactgataacatgagggggagataaaatatgagtacaaaaaatattacagataaaactaaaaataaaaaagatgtcggagcacttataggggctgcatttataatggcaacatcagcaattggaccagggtttttaactcagactgcacaatttacccaagattttggaccaaatttttcatttgtaattttaattacaacaatcctttttataggggctcaagtaaatgtatggagagtaattggtgtatcaggacttagaggtcaggatatagcaaataaaataataccgggattaggttatttagtagcttttttagtagctcttggaggattagcttttaatataggaaatgttggtggagctgcacttggtatgaatgtaatgtttaatatgaatatgacattaggaactgtattaagtggattaatagctatatttgtatttatgtcaaaaaattcaaattctctagtcgataagataactaaatttttagcattaggaatgataattatagttggatatgtagcaatatcaaatcatcctcctgttggagaggcagtatcaagaatggtaaaaccagaaaatccaaaaggattgatattcccaataataactctacttggaggaagtgttggaggttatataacttttgctggaggacatagattaatagacggtggaataacaggagaagaaaatataaaagaaataactaaatcttctcttttgggtatattagttgacacaatgatgagagttcttttatttttagcaatactggcagtggtttcaaaaggtcttcaacttgacccagaaaatccagctgcttcagcttttaaatttagtgcaggagcaataggatataaattctttggacttgtattatggtctgctgcaattacatcagttataggagctgcttatacatcagtttctttcttaaagacactaaatccttttatagataaatatgaaaaatattttataatagcatttatagcaatatcaacacttataatggcatttataggaaaaccagctactttattaattttagcaggagctttaaatggattgatacttccaatcacattaggaattatgcttatagcatctaaaagaaaagatattgttggagattacaagcatcctacatggcttttaatatttggattaatagtagttttaatatctgcatatacaggaataacttctcttagcagcctaggtgctttatttgcttaatttagaagaggtgacatttatggaaactagatacttgatatcaggggataaggcagtggttgctgaatttggaaatgagatatcagaagatataaacaaaaaagtaatttcatttatgagagcaatagaaatatcgaatcttaaaggtattgtaacagaaatggtaccaacatataggtcacttatgataagttataatccattagaaatagattttgatagtttgattgagaatttaaaaaaaatagaagataatttggaaagtatagtattaccaaaacctaaaatacatgagattccagtatgttatgatgaggtttttggtatagatattaaaaacgttgcaagctacaataatctcactgtagatgaagttataaaaatacacacaagcagagagtacttgatatatatgctagggtttactcctggatttccatatctaggtggtatggatgaaagaatagctacacctagattagaagtgccaaggactaaaatttatggtgggagtgttggaatagcaggttcccagactggtgtatatcctattgatagtcctggtggatggcaaataattggtaggacacctttaaaattatatgatgaaaatagagaagaacagattttgcttagagctggagactttataaaatttgttccaataacattagatgaatttatagaaatcgaaaaaaataacttaagtatttaaatatcgttatagtacagggagtggtatatatgggattcaaagttgaattaggaggtttccaaacattaatacaagacagaggtagagttggctatggtcaatatggtgtatctggatgtggagcaatggatgagtatgcacatagagtaggaaatatattagtaggaaattctgaagatgaggcttctttagaagttttaatgttaggtcctacaattacctttgatgaatatacgcaaatagcagtaactgggggagatttaggggctaaaataaatggaaaagaaattcaaaactggaggtcatatcaaataaatccaggtgatgtattatcatttagaggtgtgaaatcaggtgctagagcctatgtgtcaatagctggtggaatagatgttccacttgcaatgggaagtaagtcaacttatacaagatctaaaattggcggatttgaaggtagagcacttaaaaaaggagattatataaatacttttattcaggaaaaagattttacaataaataaaaaattaaattcaaaatatattccaacttatagttcagaaatcgtactaagaattgtaaaaggtcctcaatttgatgctttttctaacggtgaagtagagaaatttttatcaaataaatacaaagttacgaatgaaatagatagaatgggttgtagactagatggagagagtataaagcaccttaatggagcagatattatatctgatggtatttcttatggagctatacaagtacctggtcatggaaaaccgattataatgttatcagatagacagactagtggtggctatactaagatagggaacgttataagtgtagatttgtataagttagcacaagcaaagccaaatgatgtagtaaaatttgaacttgtagatatatatgaagcacatagactattgagagagcaagaagataagattcaagatatctacaagagtatgaaaaatataagagttgtaaaggcaaaagtattaaatgatatagcagtttaatttaattttaacaaatacaatttttattataatttataatataacttacaaatagctatttactatttaccataattaagatggtttagattagtcaaatagctatttttttagtttgagtaaatattttaaatttaaataaatacttcaattttaaaataaaagcaatatttaaatttattatattatctacaaaaagtaggtgtgttatgttgagtttatttagattttattggccaaattggaggtgatataactccatatccacgagctattgtatctttacttggattgatgattttatgtggtacattagcttttataaatgttgagtcacctggatttaatctaactaccttttcacccatacaaatatcaaccacaccactcgttaccaccataatttcttctgatgcatgatagatataatctttagcatcctcactttctggtttaagttcaaactctacaaataaaattgaaggtgtaaattcagttgtaggcattggagatactatctcgtaaaacatttcactctttggaaatttcatcataactctatcttcttttctaattactaaatcatcagtattattgtcatccataaacatatataaaggagtgtctaaaacttcagcgatttttctcaatgaagacaaggatggttcaatagcatctctttctatttgagagatataacttatagataaatctgtcaatttggaaacatcacttaatgtttttttcttgctttttcttatatttctcatcttttcacctagcataagaacctccaaataataaaattaatataaaatattcgcttaaaacaaagtaattatagcacaacatagaagtagtggcaataagaatacatagtagattttgacaattaaaatttaattaaatccaaataaaagtctatgaaaatgaattattgttaaattaatataaagaaaataataataaaaaaatttaatagaagagtattaattgaattaagattatcacattatattttggaaaagagtaaattttcagtaaattatcttgacatatatattgaagtaataatataatttaaagtataaaattttaaaaattgaattataacttcaaaaaataaggagggtaatatgaagataacagatatcaaatttgaaaagcttagaattaaattaaaaaaacctgtagtagtttcatttggagtaattgaatatggagaaagtgtaattttaaaaattgaaactgatgaagggtattgtggatttggcgaagcagcacctcttgcagcagttacaggtgaagttttggataatgttctttcagtattgcttatgtttaaaaaagagttaataggcaaagacccactagatattgaaaccatacatacaatcatggatggaattattataggtaatacttctgcaaaagcagctattgacatagctttatatgatattaaaggaaaaattatgaatgcacctctttataaagttcttggaggatttgatagtaaagtccaaacggatattactataagtatagataagccagaaaaaatggcagtagaagctttagaaagagtaaaagaaggttttaggatattgaagcttaaagcaggtataaatcctgaagacgatattgaagctgtaaaattaattagagaagccgttggagagagtataagaattagaattgatgcaaatcaaggatggaacgtaaatagcagtataaatactatcaaaaaattagaagaatttaatgttgatgcaattgaacaagcacttccacattgggatttagatggtactgcttacataagaaataaaagtaatacaaaaattatgatagatgaatcgttacattcaccaatagatgcaattaaggctataaaaaagaatgcagttgatacatttaatattaagctgatgaaatcaagtggaatatatcctgctataaaaatcaacaacatagctgaggcaagtggagtaaattgtatgttaggatgtatgctggaaacgagaattggtataacagcagcagcaaatttaatagcatctaaaaagaacataacagaagctgaccttgatagttttatgttttgtgaagaatcaaaagatatatctggaggatttgtaatggatggagatattatgaatcttgtcaataaaccaggtttaggaatagaagtaaacttatgataaatttggaggttaaatatgaatacacttttttcaaatccaggtagtatacttgctgtaatgacatcaatgattgcattgggtttttacttacaaagatacaaagccattaaaagcttaggaccagcacttacaataatcataatgggaataatactttcaaacttaaaagtagttccagtaagtactgagttatatggaactatttcaacatatgctatcccagtttctatgactataatgttgatgagtgttgacttaaaagaaatgacaaaattatcaagagaacctttaattgcaatttttgtagctgtattaactgtaagtatcatggcatttttatttggattagtatttgcagaaaaaatatcagaaggttggaaggttgctggaatgtttgtaggtacatacactggtggaagtgctaatcttacagctattggaacaggccttaatgtaagtagacaaactcttgctgcagcaaatgcagcagactatgtaattggagtaccaacattgatatttatgtttgctctaccagcaatattaaaaaattcaaagaagtttaaaaaactttggccatatcatgtagaagaaacagaattagaagattgtcaaaatgaagaatttatggagtcaaaagaatggagtattaaagatatagcttggatgttggctataggttttgttgttacagaagtttcaacaatacttgctggatatttcaattcaagttttagtagtgcagcaagaatacttttagttacaacaatttcaattataattgctcaattaaagccagtaaagaaactaaagggaaatttagatttaggattatttgttgcattattctttttatgtacaataggtttttcagtagatataaaagagtttttaggttcaacttttactataacactttactgttttagcataatttttgcttcatttgtttttcatttaggcataactagacttttaaagataaagtatcaatatgtaatactttctatagtaggagcaattgctgatggtcctacttcagctttagtagctgcttctgcaaagtggaattcgcttgtaagtgtagcagtcgtaatgggagtaattggtggagtattaggaaattatgcaggtatatcagtggcatatgcaataaagatgtctctaggattataggggggagtttaattgataaaatttaaattatacatatctggactatacagtggaaatgtaatctttgatggcgatttattaattgaaaagttgaatccttttacaaataaaatagaaagtttaaaaccaataagcaaagaagaaaatacatactatttaaatcttacaaaaatagatttaaagtctttatttaataactttgatgtatatactaaaagcttagtaaacacagataaagacacagttataaataacttaggagaaacgcattctaaacttaatgaatatatatgggttcaaagaaacaaaaagttcccactagatataattattgtagataataaaatagtaggttttatctgtttatccagagaaacttgtactatattaattatggatggatatgaagagtatactgtattaaaagaatgggaaaaaacccataaaaatgaagagatatattctataagatttggtggaaattatatgattgatatgaaagatggtataaaactttctacagatgtatatctccctgattttgtagattctaccaaaaaagcaccaacaattcttatgagaactccatatggaaaagaaaatgataaagaaatatattataaatatgtacaaagaggatatgctgttgtaatacaagatgttaggggaagaaatgaatcagaaggtaagtgggaacctatgattcatgagagggaagatggagatagtaccataaattggatagtatcacaggaatggtcaagtggaatagttggaatgcttggagcatcatatcttggttatgtccaatgggcagctgcatcttcaggcaataagcatcttaaagctttagttagtatagtaacatcaggaagcccttttattgatataccaagaaaaggaggagcttttgtatctggtatgcttgcatgggcatttatggtatcaagaaataaagttgatagaagtaaaatggtaagagatgattgggatgatgttttaaacatacgaccaatagaaaatatacctgttgaagctcttggatatagaattgaatttctggaagaatggttaaagagagtagaaaaagatgagtattgggatttgatggattggcatttacaaaaagataaaataaatgtacctgcattggttgtatctgggtggtatgatgataatagtatgggaactacagaggccttagatgttataaaggactatgaaaaaggaaagagaaaggctattctaggtccatggatgcataattcaaatactttaagagatataaatggtatttctttaggaaatagttcattaagatatgatttggattataattatctattatggtttgataaatacttaaaaggtatagaaaataacatagatacgactgctccagtagagtattactctgtaggttttaataagtggaagacagaagaaaattggccaataataaataagatagataaaagtatgtatctaataagtgatggaaatgctaacacatctttaggaaatggtagattagtatttgataatgatttagaagaaaagtatgatagttatatatataatccaaaagacccatcagtacaactaattgatatgtcagagaatgaagttggagttccaaataactacaaagatttagaaaaaagaagtgatatgttgtgttatacatcagatgcttttagtgaagaatttactgtaacaggtgatataaagttagagttttttgcatcaagttctgccaaagatactgactgggttataaaaattatggacgtggatttagatggaaattcaattaaattagctgatggtatacttagtgctagatttagaaatagtttttataagtcagagtttatggaagaaggagagatttataagtttacgattataacttcaaaaatatcaaacacgtttaaagttggtcataaaattagactagatataacgtctagtgctaaaaactttattttccaaaatagcaacacgaaagagggatataatagtattgaatatatagaagcaaagaatacgatttaccatggaggtaaatatccatctaaattgatattgccaatagaaaataagtaaatttatatagattaaatagtgaggaggtgtctcaaaatgaattttttagttcgtgagacactttcttttatacgaaatcaaatatattttcatcatttcaacaatgaaaaagaggcttatctctctgttttgagatagcctcctataagctaaattgattattttgtagctgcaacaacgctcatttcaactaacaaatgctctctagcaagtctagcttcaacacaagctctagcaggttcaaatcctttttcaacccaagcatcccaaacagagttcatagcttcaaagtctttcatatctcttaaataaatagtaacagatagcaaatgttgcttatctgaaccatatttgtttaataaatcttctattttagctaaaacttcagttgtttgttcaattactcctccttcagcatgagtttgtccacataaataaactgtattgttatgaactacagctctactcattcttccagttccttcatatctctttatttccatattttaaatacctccatagttaagaaatctattaaaaatctaaataataaattaaaaaaagtctatactatataaaattatattatatattctgataataatccataaaaacatataactttttagctataattattattgttattaattgaaaagacttattagttacttgacatagtttacacttttaattatagtataaattggaatatttagataattattatttaatgtataagctaagtttttaattaatatggctttatacatttatatagaaaagaggtacgtatgagtagcacaatcaaatcaaatcgaataaaaggtataatgtttataatagcatcagcgcttggctttgcaatgatgtctgcattcgtaaagctagctggagatttaccaagttttcaaaaagtgttctttagaaatctggtatcagctataatagctttttggcttatcataaaacataaaggaagtctaactggtaaaaaagaaaatttaaaagtacttttatataggtcaatatttggaactctaggagttatatttaactactatgcaattgacaagttgatgctttcagatgctaatatgctaaataaaatgagtcccttccttgtagtaatattttgtgcaattgctctaaaagaaaaaataaatgtaaagcagataggagctattataattgcatttataggagctttattcataataaaaccaacatttagtgtagaagtaattccatatcttgggggaattgcaggagctgtatttgcagcaatggcatatacttgtttaagagttcttggagatagagaagattactatacaattgtatttttcttttcagttttttcattagttactgtagggccaattgcttttgcagtatatgaaccaatgacccttatgcaacttatatatctattactaggtggagtatttgcaagtctaggtcaatttggaataactttagcatataaatatgcacctgctaaggaaatctctatatttgactatagtaatataatcttttcagcaattttaagtatattcttattcaatgtctatccagatatgttaagtgttgttggatatttaatagtattttcggcagcattttatatgtttttatacaataagaagttagataaattagacaaagaaaagaagaagtaaactagataaaagtgtttttataatttgtattgaatatttaagtctttgtattaaaattaaagaaaatttaattaaaaatgtttggtatattaacttataacagcagttaaaattgaaaaattataactgctgtttcttttattaaaaatatccaaatgtctgtaaaaatagactataatagagtagtataaataatataaaggggataaattaaagtatggaaaaagtgaaagttgctgtgattggagcaggtaatagaggaacgtatgcatatgctccatatatttatgaaaattctgatatatgtgaaatagttgctgtagcagaacctaaaaaaggaagacgagaactatttacacaaaaatataacctagatagtaaaaatgtatttgaaactttagaagacttttttaaacatgacaagatggcagatgcagtaataatagctacaaatgatgatagacattatgatgtagcaaaactagctcttgaaaaaggttatcatgtactattagaaaagccaatgtctaatagtttagatggtttggtacatatagatgacttgtgtgataagtataaagataagatttttatgatttgccatgtactgagatattctccattttataataaattaaaagaaattgtagaaagcaaaaaattaggagagctagttagtatacaatataatgaaaatataggatattggcattttgcacatagctttactagagggaattggagaaatagcaatgaaaccagccctttaattttagcaaagagttgtcatgacatggatattttgttatatttagtaggaagtagatgcaaaaaaatatctgcatttggaagcttaaagcatcttaataaccaaaatgctagtggagagatggcacaaaattgtcttcagtgtttagttgaaaaaaaatgtccatattcagcaaagagaatttatttagaaaaagatagaagtataaatagagctgttcacataaatccaactgaagagaatctattaaatatacttaagacaagtccatatggaagatgtgtttacagatgtgataataatgttgtagacaatatggtaaatatattacagtttgaaaatggagtgacggctacttttaatttatgtgcatttactaaagaaaatggaagaactataaagttaatgtttagtcatggtgaagttggtggggatttaaataaaaatgagataagaattaaaaaatttggaaaaaacgaagaaatagttatgaatccatcaaatcaacagaatatggtagaggaatatgatagaaatcttatagctgaatttattaaattagtttcaaataaagaactagaaaagggtagagtagcagcaaaagaagctatacaaagtcatgtaatggcatttgcagcagaatattctagggtcagtgatgaagtagtgtatatagaagaattttttgatagtgctaagcaaatgactaaggagatagaagaaactatattttaattaataaaaatttattaaataaaataaagatagattaaataatagaaatacgaaaatatgtgttctattaaggaatctatcttttttattaaggttttttcttatccctatcaaaaaaatccatacattctgataaaagataagaaagtaaagcgaataagatttctgtacttaaaggaatcgttactgaatccataaaggtatcaattatgttcatagctagaaaagttagtataaaatcaattataaattcgcaaagtttatatattgagtatggtaatttgtttacatatctgaatatatctaaaatagtagtgcatagaaaatcaattggagtggttatacaaaaatatattaaaaagaaaattaatacagctccaagagatttatattcaaatcctaagaatgataagaagccaattcctataaccgtgaaaatacaaaaagttataccaaaaaaaacagcaaaaaataaaaatacagaaataaattcgcctaaaggaatccttcttttattacttatcttaatcaactccttaatttatgatatgaaatttatataaataataacattcttaaaaattcataatagtcctctgtttcaaatagtactgtttgagaatctatttttttcatatttggataaaaagaggccttaaaagctttataatgttctctaaattttatttctatcttaaatttatctggcaattttattaagtgcctagataaatctccagataaagcttttttgacacctttttcaattttttttagtgcaaggtttggatggattgaaattgaaccatttccaattccttttgacacaggaacagtgactatatttggatttagtttttttgcactctcacaaagcatttcatctccacttaaaaatgctacaggaacattataatatgcagcaatataagcatttatagtaaattcagatgctatttcatcatttattttaaaatagtcataatcaatatccatagtatgagaaagtggattaccattacaagtagctccagagtgatagccggtgaatatacatgcatcaaagctttcatcaattccagccatcataactagtgggtctttggtccatcctctaagtattttgacgttttcaggtaaaatatttggattaatatttctaccactgtcatgtgcatctttaacaagtatttcatgtacaccagattgagtagctccatcacatgctgctgttatctctttactcatttgtgttctatagtgttgtgaaaattcacattcaagttttgtttcatcccaatttacaataccacaagtaccttctatatcagcacttaaatacaatttcataatatatacccccttatgtttattattgatgataataacagataacagaaaatacataatcaataaagggcataaaaatattatgtcttactattaattattattaaatctgtaactgaaaaataactaaattggtattaaaaaatataacactatgtgtcatttatttatatagttttttatatctgatgtttatataaaattgtaacatataagtggttacatttactagtttaacatagttaaaatagttaggtattatttttaagttaaattgattattataaaatcgtagaataaaagaaaaatttaatttattaaaatgcatgaaatgttttttcctcaacataatgctaaattaaactcaaaaagaaataatagaaaaatcttatgtagcttagaaagaatgtgaatgatttaagggaaaaatagaaatttattatataatattaggctgtattatgtaatacagcctaatattatatgtatatgtgacataaaatcttggtaagtgtaaataaaataaatgtggaaaacaaattaatgaaatcaagaaaaaagtaatttaaaattcaatttcatcttcccaattaaattctcctgatttttctacactcttaggccagtgactacaccatttaggaacggacggattttcaaccctatcaacgcttggagtatatggctttaagtctataacaggactattatcattagcatcaatatatggtatttttattataccattttcatggtcgatattgataatttgtacagcagtcaatgctattggattgggtcttataggtgaccttgttgcaaatattcctataacgtttggtccacttttataaggttttggggtttctaaaatacttcttagttcaggattatcaaacccatcagcccaccaaaatacatttaaatgactgaaatcgtcgagttcatttaatgcaggtacatactttttgtctaatttaataaagacctcttcgccttgaatacatattttacctataggatttattaatatttctttcataatattacctccaactatttaatttatcatttgtaattttagggtataacatgacatcatgtgagggtcaatataaaataataaataaaaatattaatagttagaatgataatacattttttacatggagcatgacaccagtaataaggcaatcttcgtcaatatcaaaagtagaggtatgcaaaggggaagtaatgtttttttcacgatttgcacaaccaaggtggtaaaaagctccttcacagtgtcttagaaaatacgaaaagtcttcagccccaagagtgggcgagtctttaaggataatattttcttctccaaacaattctacagcattttgcttgacgtaatctactagatggtttgaattgataagagctggataaccttcctcaatttcaacagaaatacttcctccaaatgttttacaagtaaaatcgcaaatttctctaattcgtttttttgaaaactctctagtttcaggagtcaaggttctcaaagtaccccttataaccactttgtcacaaactatattttccttgattccaccttcaatctttcctagagaaataaccacagaatcagttggatttgtgtttcgactaacgattgtctgtagagctgtaataatatgagcagatataacaatagcatcaataccttgatgtggataagctccatgacattttgaaccatgtacagttaattgaagtgtatcggtggaagcatttagagtgttgtattttaattcaattagatttttgttgatattgggatttacatggagtccaaatatatattttacatttgggttttcaagacatccatcttctatcataagttgagccccaccaatagtttcctcggcaggttgaaaaaagaattttacatttacatttaagtaattctttaatttaaatagtatattacaagtacccagtaaaatagcagtgtgtgcatcatgaccacatgcatgcattttaccaatattaatagatttataagaataattaagttcttctgttataggtaaggcatctatatcagctcttatagcaactgtttcaaagtttggactcacgttaatgtatgcagttatccctgtatgattcttatattcaatataatttatacctatttcatttaagtatttaataatttttttcttagtttgaaattcttctaatccaagttctggagtcttatgtaaatctcttcttatatttataatccaatcatttatctcatgacaaagagttcttatattaagcataaaacacatcctaactatattaaaaatttatttttcttcattaattatattattttatgtaaatcattattatgtatcaagtacaaataaaatatcttataattatattagagatatttagtatggagaagaatatatcattttataagaagaggtgtttaaatgttaggaataattgcgccatctgggccattaagaaatacaagtttggaggaaataaagtttaatttagaaagttatggttacgaagttaagttttctgaaagttgtagtttaaattataaaggttatttagctggtaatgatgatattagagcaagggatatagaagatatgtttttagataaagatgtagatataattatgtgcttaagaggaggttatggaacaacaagaatattggataaaataaattatgatataataaagcaaaatccaaaaccatttataggtttttctgatataacaggtttaaatttagctttttataaaaattgtggacttttaccatatcatggaataatggcagcaaatgtaggtaaatgggataaatttacctataaatcattggtaaatgctttagaatttaaagatgacttatatttagaaaatccaaaagaagaaaagatttatactgtatgtgaaggtaaagcagagggaataataatgggaggaaatttatccttaataattgccacaatgggaacaaaatatgaaatagatgcaaaagataaaattttgtttattgaggaaattggagaacctcaatataaactggatagaatgttaacacaactatattcttcaggaaaacttgaggaatgtaatggtataatttttggagattttaaggattgtattgaagaaaatgatttgatggaattactaatagaatttgcaaataaggtcaataaaccttctatatataatcttcagtcaggacattgtatcccaatgataactattcctttgggcagaatgtgcgaattagatgctacagaaaaaatcgttaaattaaaaaaatagtgtgtatataaatataatagaaatatggtataatcttatacaagtaaaaatttagctaggaggatgaaaaatgtctgatgatagaataatagactttaacgaactaaagaacaaagttaaagattctgatgtagataaatttgagcaatacatatataacttatatttttctgttatggatggaaagatgtccatggctgagttttcaagaaaaatattcgattatatgagagataacaacatatctcaagaaaaatttatgaaaatacaaaagcaatttatggagagatatggtatggacactgaagaagtagaaaaacaacttagaaactttggaatcgacccttctacagcaggttttatgagtaataatacttccagcaaagtatctacagaagatttagagtcatttaagaagagtgcaggattttatgagaaatatggagaaaaaatccaaccaaagagttgtataacaacatttataaaaaatgacttaaatgatattaatgtaataatcgaccaagaaaagataatgctttgtagtgatagaaaaataaatcttatggattcagaactaaatgagtttttattagaatataagaatatgtttaataaaaaaataaaggtagtaatgtgcgaaactacgaataagtatgattattaaaaaatgaatttaaatactgaagtagtatcaattaattgtactacttaaaaataaaaatcgcaatttattattccttataaatttgtataaggaatatctaaactgcgattttttatattgtgaagattagtcataatagatagtgttttaaattgtaatcttctcactaaaactgtgtttttctattagaaattttattaaaaataaatatctgataattgtattatatgggatgtaaagtattagaggcttaacgaatctcttttaatacattaactccattttgaatcatactgttgaaaaatactaagtttaaaatctcagcagggtgaatgttaggaatatcataagtatctactaaattcataggtacaactatatttttttcaatattatgttgattaaaatatgattttagagttattgcaaattgatatatgcatatatctgtgcaatcgccaactataattatattatctatattatcaaaatccaaattttctaatgcaaaaaatccattagtagaatttttaggaagaatttgtaggttttctatcgacttaagttcatcaaccaattcactttctacatcattttccaaacagtgaacaggataactcaaaagttctattgatttaggagtatgagaatcagtaaatgctattactctatttaatttgtttgatattttttttgtaaacatttcaattggttttattaaagactctactctaggagagtataatgcaccttgtcttgcaaagccattattaacatcaattataaataaagcagttttactcaaatcataattttctattttttctattggtagattatctaaattactctttaaagcttcaagttcatttaataagttatccatagttatacctccaagataaatttaataaaattgtacatattaattatataaaagtcaaggagtacaaactattgtataattagctgtattgttttgagtgtaaaagatttgaagcaatatctggatagttagtaaaaataccatctacattgagttttagacagtgtagtatatcatcctcttcatttacagtatatacattgacaccaagtagatttttgtgacaaagttcaattagagattcatttactaaaactagaggtggatgaaggtaactattacccagaaatttagcaaaattgactacattgtttataggtaaataacacaataatcctgtttttacactagggtctaatttatgaaagttttttaagctattgctgttgaaactagatataagaactctatttttcatattatactttaaaataagctctaaaacgtctttttctatattgggatagtttattttgtcagtttttagttctatatttaaaataaggtctgtaggtgaaattagaattaatacttcttctaaagttggaattttacattctttattgttttgatatccttcaaaagatgagtttagagtttttaattttcttaaagtaaagtcttttacaaaaccatgtccattaaaagttctatcaaccttttcatcatgaataactacaatttttccatccttagttctgtggacatcaagttctattccatatatatccatatacaaacattttttaaaagctagaatagtattttctggatactttccactaaaccccctatgagcataaatattcatttatatggttccctcctataagtataacttatcttataaaaatttaattaatataatatatcatattccaaaaggtattgttatatattagttaaataactatttgtaatttatatattatataaatgtagaaaaataaaatcatatatgtgttataatatattttaaacattgtaaatattacgaatttagtagtcataataagtgtaattttatgcaagctcatgtttttagagcttgcatatgtattattaatatatttatatattgtgaaaataaaattccaaaagaattttttctatagacttagtagtaagggggaattttgatatgtatgaagttaatttagaacgagctatgaattattggatggatttgttagatgattatacgaatatagcaaaaattccaaatgattttttttataaagattgttctgatgaagtagtagatgaggtttttaagatgaatattgagaaacatgaaaggttaattcaatattctaaagtgaacaatattagcatagactctatcatagaaactatatatggccttatacttcaaaagtatatatatgaagatgatgtagtttttggtaaaacaatgaatataattccaataagagtaagagttagacaaagtgaaaaatttatagatgttgtaaggaagctaaaaaggcagtggagcaggtctttagagtatggatactatttgttatcagatatagagaataaaaatcatctaaatactaagcttataaacacaatatttatagctaaaagttttgatttatcatatgattatgacatagaaaaaaaaggatatgatttatctgtaatagtatatactaagagggcacttaaaataaaaataaagtataaaccatctatatataaaagagaaactattagaagaattttaaatcaatttgattatataatagagcaaataatagaagataatgatattttaatagaagatttagaatttgtatgtaaggaagaagaaaaagtattattggaagactttaataataatcaatatgaagtaccctatgataaaagttatgttgatttatttagggagcaagttaaggtaacacctagtaatatagctgctagggatgaaaatagaaagttaacatataaagaattggatgaggtaactgataaacttgcaggttatttaaatcatataggagtggaaagtgaagacatagtagctgtaatgttaccaagagatattaacataattattacagcaatagggattatgaaatcagggggagcattttttccaatagacacgagtaatccagaagaaagattgaattaccttcttgaagatagtaatgcaaaagtagtgataactacagatgaactcaaaagtaaggttgtaaatgagaataccatagtactcgatataaatgatgaagaaatgtttaagcttggatatgaattaactgaaaaaataacatcatcaaattgtgcatatacgatatctacttcagggtcaactggtaggccaaagaccatagctatagaacataagagtttagtaaatatgtgttattatagcgtaaaatctataagcgctacagaaaatgatatatgtggtatatacttaagtttcagttttgatgctgtaatgaaacaactattcccttatttgcttgtaggtgcatcaatagatattatgcctgaagaagctaaatttgatgaatatacagtaaatgaatactgtgaggaaaatgacataactatactagcattgccaacagcatttgcaaggttatttatacaaaattgcaataataattcacttagagttgtacagactggaggagaaagattaaaaggatatagaaagcgtaattatgaactatataatgagtatggaccaaccgaatttactgttgtatcgacttcttttcatgtggacagagaatatggaaaaataccaataggaaaacctatatttaatacttatgcatatgtattagataaaaagaacaaactatgtccaattggagcaccaggagagctatgtctatcaggcattcaaatatcaagaggatatttaaataaaaaagggctaacagagcaagtatttgtagagaatccttacaaaacttgtgaatataataagttaatgtatagaactggtgatttagtaagatggttagatgatggaaatttagattatattggaaggatggacaatcaagtaaaaattgatgagtttaggatagagctatatgagattgaaaatataataaataatattacagaaattaaaagtgttgtttgtatatcgagaacaaatgatgacggggatatgtatatatgtgcatattatgtaattgatgaggaagatagtggtaagataaatgaaagaaccattagagaatatttaaatgagcatctacctccatatatgattccaacaataataatgaggatagataaaataccagttacaccaataggaaaagtaaataaaaaagcactaccagagtgattttttattatgacaggtgttgtaaagtgattccatacatttctttatgacacctatttttctgaggaaatcaattgatgtaaaaaaaagaattttctgtatatatttactatggtgaaaatttatttataagaatgattattgtattttttatacttttccgtgttttaaagcattttttttacaaaattaattttacattaaaaattttttttattttatatcttaatagtttttagtagaattgaaaaataaaaagaaaattagcataaaaatatctaaaagtagaaattaataatatagggttaaattttagtagttttgactcgctatttgtaaaataataaaaagttaagttttatatgtatatatgttataatatatacaaattgaaaaggggtgaaaattttatgaacaaaaaattacctaagggtgcttatggtgaggttagtggaaaagattacgttccatatatcacagataagtccagaaccggtggaaatgtagctgtactgattatcggtattattttagctgccatttttgccgcatctacaacttactctggaatgaaagccggtcttacagttgctgcaggtattccaggagctataataggttctgcttttgttggagcatttgctcgttcaaagggtattcttggtaaaaacttaatccaagggatgtcaagtggtggagaatctgttgcaagtggatttattttcgtattaccagcagttatattaattggaagccaaattacattctttgaaggcctagctgttggagttggtggagttttatttggtataggaattgctgctatagttcacaactatctaatagttgaagaacatggtaaacttatgtatccagaatcaatggctatatctgagacacttgttgcttcagaggctggtggagattcaattaagtacatgggaattggatttgtaataagtggatttattactgtattaactggttcattcttaaatgtagcaaacaatgtaatgagtcttgtaggaagcaaattctacaaatggaaatttgatattgaagtaaatcctctacttttaggaattggatttatagtagggcttgaagtttctttaacaatgtttgcaggaagtattttatcaaactttggtatagcacctttaataggatactttacagatatggctaaagatggagctatggtatggaataatcctgcaatgcctcttaaccaaatggatgtcggagcaatatctagtagttatgtaaaatatataggtgctggtatgatgctttgtggaggtattattggtgcaataaaacttataccaactataatcgcttctataaaagaaacacttaaagctaaatcaagtgctggagaaggagaagaaggttcatctatacaaatgatacttttattaggtggagtagttattggatttttagcagcattcttaatttctggtaacattgttatggcaattattggagctatcatatctcttttattatctttattatttgtcatagtagctggtcgtttaacaggaacaattggaacatcaaatcttccagtttctggtatgactatagcttctctagttattgtaacattagtgtttgttataatgggatggactgatttagaagctaataaatcattacttttatttggttcatttatagttgttgctattgctatagctggaggttatactcaatctcaaaaagtaacttatattattggtggtagcaaaaacgaaatgcaacgttactttacaattgcaagtatagttggtgttatagttgttgtaggagtaattttattactttctgaccaacttagagcaactggtgataatgtacaatttgcattaccacaagcaaacttaatgtcaacattaacttctggtattatgtcaggtagtttaccttgggttatgattattgttggagtatttatggcaatagttctatatgcattaaatttaccaataatgactatagctataggattctatttaccaattgcaacaacttctataatattagttggagcattaattcgtttatttgttgaattagtatctaaaactgaaaaagaaaaagaagttaaagtttctaatggtataagtttatcttctggtcttgttgctggtggttctatcattggtttaataggtataatattacaagtaactggagttgtaactccaaaggtaccaagtggatttgctgcaacaaattcaatggcaattgctttattagtagttttagttgtgcttacaacattacctattgttttatctaaagtaaaaaataatgagcaagagtaatgatgttttagatattgtatttaaaattactgatggacttgaatatgaagtagctgaaaatagtgttgttactatacttgaaaaacaggaccataaaattcaaaagttttttagaaagttaaaagctagaatacctaaatacaaaaaaatagaactagatgaatattccagttttgtttttttacaaattgatggtcaaaggactgttagagaaataggcaagaacctagaagctaaatatggagaagaatctcatccactttatgaaaggttgttagtatttttaaatcatattgaagttaattgtcactatattgaaagactggatatatagatataataagaattattatagatatattaaagcatataaattagaaggtaattatgaaagaggctgtctcaaaatagagataagcctcttttgtattgttgaaatgatgaaaacatatttgatttctcataaaaaagagtgtctcataaaactaaaaagttcattttgagacactacctttaaaatatttataaagtatagatttaaagcaaaacttattaaacttaagattattttaatatcacttattattagctatttcatcagctagattatttaaatattcccatctttcatatttgtattcaagttccttttctagtttagatttctcatctaaaatttcttgaagtttagtaaaatcagttgaaaattttgcagtactttcatcaagtgttgcaattttagattcgagtttttctatatcagagtcaatattttcaaactccctttgttcattatatgagaacttaagctttttatcatttttaggtttttctttttttagggtagtagagtcatcttttttaactgattcccttttagattcttcaaattcaattccttgaatctctctataaataagataatcactgtaattacctgtatagatatgaatttttccattaccttcatatgcaaatattttattacaaattctatctaagaaatatctatcatgtgatactgtaactactacacctttaaattcgtctaggtattcttctaatattttaagcgtttcaatatctaaatcatttgtaggttcatctaaaagaagcacattaggagctgtcataaggattttaagaagatgtagtcttcttctttcaccaccagataatttacctatcaaagtatattgcatagtaccattaaaaaggaatctttcacacatttgagaagctgtaatcctagtaccatctgaagtttctatatagtcactagcttcttttacatagtctatagccctcatatcaatattcatatgagagtcgtcttgagaaaaacaacctattttaactgtttctccaattgaaatatatccactatcaggctctatttctccattaagtatatttataagggtagatttacccataccatttttgcctattataccaattctatctgtacgagttaaagtgtattctaaattatctataacagtattttcttcaaatgatttagatatattgtgtatttctattattttatttccaagtctacttgatgcaacagatatatcgagattttcatcaggtttaaaagaatctctattcataagttcatcaaatctttgtaaacgagctttttgtttagtgctacgagcctgagctcctcgttttacccacgcaagctctgttcttattaaattttgtcttttatcttcaatacttgcttctagcgaaagtctttccattttcttttccaaaaatattgaataattcccatcataactgaataatctacccttgtccagttcaataattctatttgtaacacggtctaaaaagtatctatcatgagttatcataagcaatgagccttttcttgaattaagatattcctcaagccaatctatagtatcattgtctagatggtttgtaggctcatctagtatcaaaaactcacaaggtgtaataagggctgatgccagagagactctctttctttgcccaccagaaagttctgctattttttgattaaagtcatttataccaagctttgtaagtactgacttagcttcactttctaaatcccaaagatttaaggcatctattttttcgtgtactgataataattttttatttaattcctctgtaaagtttgaattaagtttttctaggatttcttgatattcaccaagtagctttaattcttcagaagttccattaaatacttgttcaagtacagttgaattttcattgtaagttggattttgaggtagatattctatcctaataccattagtttttgttatattaccagtctcactttcttcaactcctgcaataattttgagtaaggtagatttaccagtaccatttacaccaataagtcctattttttccccctcatttattccaagagatatattttctagtaattttttttcagaatagcttttacttatattttccaatgtcattaaattcatataattcacctttatttctaatctattatttttcaaaatgttgataatctgggtttttccaatagccaccccaactccaacctctgcttacaaaagcattataacaatcatcacctttttttatcattccaaattttgtgctagacctatcagcataaactgtacttattttaggtgtaacatcatttccagaaacttgaggattctgtaatgggtttatatctatagcacgtcctttaccatgatttgaaactacatttgtaccagctatagttctataacaaaatgatgaggtattattatcagacatagatttttcatctacagcatcatagtcatctattaatttaattttttcaattggatattttttttcgtataattccttaaaaatatccactacttctggagctagttcactgtttactatcatttctccttgatgagttttttcatcaaatccataatatgtaagttttaaataagatagactatcaaagcttataggttcatcagtaggcatagatttaccaatcattttattttttatattatctggtattgaagaatatgaaaaagtaggcttgatattattatcttcctgctttttggtagagctttgattatttttagaatcatctgttgtattatttttattctgcatagtttcttgactctttatattaccttttttgttgggattagagaacagtatctcatatatagataataaagcaagaaataatacagttattacaatcgttaattttaatttattaatttttcttcgttttgactttttactcatattatcccccagtattagattcatataaactatatatattatacctcataaaaataaactaggctaacaatatttagttaacctagaacatttcatttatagtttctccaattatttttattccaatttcaatgtcttcaaaagacaacctagaaaatccgagtcttaaagtatcaaaaccagagttatctgtaaaaaataaatctccaggcataaatataacatttttttcataacatttttctaataaaactctagtatctatattttttagttttataaatatatgcaaacctccatcacccaagatatattctgtttttatatatttttttatacatttatatgcaaagttaaatttgtccccatagaatttacgtatttttttaatgtatttttcaaaacctccattacttaaataatcaaataaaattccttggtctaaaaaggatacatgtatgtttctgcacctttttacactttctagtttattgattacttttttatctgcaaatatccatccaattctcattccaggaaataaaatttttgaaaaactaccaatatatacgaccccattattcatattatctagggaacagataggaaatatatgagaactattgtagagtaattcttcattaaatccatcttctataattgctatattgtattttttcataagattatagaatttgtacctattttcaggagtcattacaattcctgtaggattgtgataagagggtgtaatgtatgcaaactttattttatttttatacttaactaaattgtcttctagcatattgaagtccaaaccatcttcatttatatctacacctaagatattgaggttatgagatttcataatttttatagcagtattatgagtaggattttcacatattatgtagtctttttcttgggtaaaagatgacataataatatcaaagccttctgtgaatccatttgttattagtatatctttattacttatatcagcacccttgtttgtcatatattctagtaaatagtcaataaggggcttataaccttgtgcatatccatagttgagtaatttatgtccttctagtgaaattctatttaaaaaggatttttttaattcttccatgtcgaataaatctccatctggagaaatacttttaaaggaaatcaggtcagagctccaaggaatttcactttttataatgtccaattcattggcttttttagagtatgtattctctaaacaatcccagtttaatgaccatgtagtatttgaagacttattctttgatttaacaaatgtaccttttcctgaaatagagtagattaatccttctgattttaattcttcataagttaaaactacagaatttcggctaacttgtaaaagctgactaagctcccttgtagaagggagcttactattgtctggaattagtccttttgatatcatatcacttatataatttttaagttgtatataaattggttcattatcatttagttttagatttgaaaatatcaaattaccacctcaaattatttcatctaatttaaagagtattctataagtttatctaatagttcactgtacttaatacctctagcagcagcacttctaggaattaaactagtttgagtcattccaggaagagtatttagttcaagaacatatggaataccttcacttataatcatatcaactcttacatatgctttgcaattaaaaattttccaacaagtctcagaaatttcgtttactcttttttgaagttcttcatctaagtaaacaacttcttcctttgcacctttttcaactgagtatttagcttcataatcaaagaatcctgaatcagattttatagatattgtagggaacacttctccatttaatatgaatgaagtatattctccacctggtatatatttttcaatcattacaaattcgtcaacttccagaccttttctaactgcttcttcaacttcatccttagaatgaataaagaatgtggctacacttgaacctcctgagtttggttttataaatactggataacctatattatctatttcatcatagtcgatttcatcaactgattttactaaaacccatggagcagtaggtaggtttgaatctctaagcatttttttagttatatttttatccatacacatcccactgcaaagaggtccacatccagagtatggtatatccatagtctcaagtattgattgaatacatccatcttcaccaaattttccatgtaaagcaagtattgcaaaatctatatcttctggtatctttgtaaatatatcttttttatcatctattattacttttacaacttcatatttatttttatcaaggttattatatatctcttttcctgaatttaaagaaacttctctctctgatgatattccacccattataactgctattttcatattatacactcctattttaatttttattattttaaagtaaactttttatttacatacttaattatatgaattaacagttgaggatgaaagtaccactatatacgaagtttatattatgtgtggttttagaataataatctagtttaaagatatgtttaaatgattttttaactttatttatgttattatttttgctaaaattattgttatgaacttaagactagtcttaatggctataaatcaaggagtgataaattttgaaagctgaaataataagtgtaggaacagaaatattattgggagatatagtaaatacaaattctcaatttttagctaaagaacttgcatcattgggaatagaagtataccatcagagtactgttggagataacaaacaaagacttttagaatgttttgatgaaagcttaaagagaagtgattttgtaattactacaggtggtcttgggccaactggtgatgatatgacaaaagaaactgctgcagaatactttggtcagaaattagaactacataaaccttcactagaggttttggaatctttctttgttaaaacaggaaaaaaaatggccgaaaataatatgaaacaagtgtactttccaaaagatgctatagtactaaaaaataataatggtacagctccaggggcaattttaaaaaaagatggtaaatttataatagtattgcctggacctccaagagaaatgaaagctatgtttaatgagagtgtcaaaccttacttacaacaattcacaaatgaaatgctagtatctaagactttaagattatatggaataggtgagtcaaatctagaattagaaattctcgatataattaatgagcagactaatccaacagttgctttatatgcaaaagaattagaagttacaataagaataactgcaaaggctgaaaatgaaagagaagcttttaaattaataaaaccagtagaagaaaaaataaaaagtagagttggtaaatatgtatatactgaaggagatatttccatatctgaaggggagactgctttagaagatgctgtttctaagttacttgtagaaaaaaatctaacaatagcagtggctgaatcttgtactggaggtttggtttcttcatctcttataaactatccaggaatatcttctgtatttcttgaaggatgtgtaacatattctaatgattctaaaatgaaaagattaggagtaaaaagagaaactttggaagagtttggagcagtaagtgagcaaacagctatagaaatggctgagggcgttgctaaaggacttaaagctaatataggtatatccacaactggagtagctggacctggtggaggaaccaaagagaagcctgtgggactagtttatactgcaatatatataaatggaaaaacaatagtaaagaaaaatatatttaatggggatagaagaaagataagattaagagctactagagatttacttaatgaattgagaatacaattagaaaagctttaagttgttatgatattggatatatttgaagtgttactataatataaaattgtttttggaggcttttaatttatgataaaacatatattttgtgatttagatggaactctatatgaaaatggaaccataacaaaagaagatatagtagcaattgaagaaatagaaaaaaagggagtacagtttaatgttgctacaggtagaatttttaaacaagcacataatattatcaaagatagtttagatatgaatggatattatgtatgtgaaaatggttcatttatatatgataaagattataatgtaatttttaaaagaacgatagatgataatttagtaaaaaaagtcattgatagatttgaatcaagtgatgcacaactttattttaaatataagggtgatgtaattgtgggtagtgataccactgcttttagacattattctagtgactttatagttgacccagattttgaaaaaagaagtagttttgataatcttataggaaatataggcgtatgttctgaaaatttggaagagttatccagaatagaactttatctaaaaagtgagtttagtgaagtattagaaatatatttttctggaacatatactttaaatatagttcctaaaagtgtgtcaaaaagaggaagtatagagcatgtaataaaaacgttaaatgtaagtccagatgaagttgctactattggggattctccaaatgatatttgcatgttagaaggatttaaatatagttttgcaatgtctaaggcaagggaagatgtaaagcaaagtgcaaattatgtagtagatagtgtaaaaagtgccatagatgttataatggagataaatagttagtataaaaaatgactgtcctagagaagtataaaattatattctatagagcagtcattttaattatattcaattataagtttatataaatttaaaaattcttaagttaaccgcaatttgctatatgatatgattttattgtattagataaaatagagtcaagtatataatttatgacactattacaagtataagctgaaaattttaaatcattcatataatcagttttctttttgtaatcactataaagtttagtaaaaaacttctcaaaactactatttatagtaccacatttaattttagataaatcaacatcttttgcaaatgctccaagttctctttcataagtaacatgtttatttaagctatgcttaaattcccaacgttcactgtgagctacacagaaaaaatcacataaaaaatgacatatgactcctagttcctgactaagtctacttactgaaaagtatttagaaagactatctatattaagactgcatagatagtttattttagaaacaatcatattaaatgactcatctaaataatgtttttttaatttatatttagaaaaagcatcaggctttatattgccatatataaaatttttttcgcttataaagaatgttttattttcatctatattatcaagtattgattttgccataataaaatgggtattcattaacatatttacacctcgtatagtttattagacttattaaatatattattatgatatgatatttatgataaaagtttaatggtaaatatatgaaactaagtcaacagtatttatttaaataatttcaaccatattcataataacagtaaatggccaaatttacaatatgtaaatagtgttaagtttttatttatcaaatttaaaattaagtattagtatactttctaattaacctattggctttagactgtgagatttcaaggtgtttggctactttataagaactaccaaatttttcataagcatccaaaattatatttttttcatactctttaattaaggtgtcaaaatttttatttttataattagtagattttgagtcagatataataaccttattaatttgggatatatgtgttttatttccattattggtaatatgtatattttttgtaagaatgtttggtaagtcatctattgttatatgattatctgtacaagtaagcaagattttttgaattatattttgtaattctcttatattgcctgggaatctataatttgcaatagcatccatagcttctttagaaatagttttatttaggttgaagtcacttgagtacctattaaaataatattttataatttccactagattatcccttctttctctaagaggaggcaattttatttctataacatttaatctatagtataaatcttctctaaactttttttcttttacttttgaaactaaatcagcatttgtagcagatataattcttatatcaacctttttattttttaagctcccaactggagtaaaagttctatcctgtattaattgcaaaaattttgcctgtagattttgtggtatatctcctatttcatctaaaaaaagagttcctccattagctaattctacgagcccaactttacctttagtacttgcacctgtaaaagcacctgaagtatatccaaaaagttcagattcaagaagttgtggagatatagttgcacaatttattgttataaatgggccattagatctattgctgttgtggtgtatatatctagcaagtgagctttttcctgttccagattcacccaataaaagtacacttacatccgttttagaaacatgatttactgtgtttatgattggtctcatcactattccgtccataattacagtatcttcaattctaagtgcagttctgtatagtgtttctacctcagatttatatttttttacttgcttttttgtgtcttcaagtttattttttatattattaagttcagttatatctctacaattttcaacagtaaattctaagtttccattttcatcaaatataggggtagcagttatgataagctttttccctgtttgagtatcttgttccagtgaaaatttagtctttgtttttaatacaattggtatggggctttttgttgaatatccagagtcttctaaaaaagaaacattttttcctaaaatatcttctttttttagaccataattttcttcaaatgctttattacaatatattattattcctttatcatcagaaacacatatttcatcatgggaagcttctaatattttttgataaaattccaaatctaaattcatttttatattttcctcctaaatttttaatgatatattaaaataggtttaattgattaatatacttaaaatttgatatttatataagtttcagtctattttaactttaaataagttatatataactcattttacaattaaaataagtctaaatcaacttaaagtaagcgaaaaataaatataagaaaattgaaaacttattagtattattggaaagactagggttttagagtcgatatatattggtttaagatggcataatttttgcttaaaaagaagagtgtaaattgactaaataaaaatagaagggaatttaaaatgggagaaaaaagtaaagggtatgtatttatagcaatagcagggttattatgggctacacttggattatttggaaagtttttaatgggaaatggactgacatcagaacaagtagcatttacaagattgttttttggatttatagttttaggcgtatattcatctataaggacaccacaaatcttaaagataagcaaaaaaggaattatatattcagtaataataggaattatatgtcaggcaatgtttaatttatgttattttaaagcaattgacattgcaggtgtatcaattgcagcagttttactatatacatcaccactgtttttagcaatattttcaaaagtatgttataaagaaaatattactagaagcaaattattttcacttattctttgttttattggtgcaattatggcagtgactggtggacgtttggattttcaaggtttaaacgcttttggacttttacttggggtattatcagcaatagcatatgcacttatgccaactattagtaaaaatgctttaaaggaattttcaagttcaacaatattagtatacagtttcttatttggagctatatttatgattccttcttcgagaccttgggaaatcttaaattatgctaaggatttagatgttttatcttgtatgctaatgttaggcattgttccagctgcacttgcatatattttttatgcagcaggtatatctaaaggtgtagagttgtcagttgcaggtgttgtggcatcagtagagttagttggttcagtaataattggttgcactatattaggagaaagtttttccttagggaagttatttggagtgatgttgatgttaatatctgcagtagtagcacttaatctttcttatgatgaaataagaatattttataaatccaacaagttaaagcagattgaaaaaactgaaagtatttagaattatatacttaaaaaggatttattggtatacattttagaatccaacaaaaattataccaaattatatttggtattaaaaaataactatttataaattttatagaataaagtggacagtacaaataaaatataagtagatacagtttagactatctattttttattatatattgtataaatgtacaaattaatattttgttttgtaaatactaaataactatagaaaggactatatttatataaccatttctatagttattattttgtattaaacaaacttacagccctgataagaatttctagcctttaaagtatcatcaatttgatttaaaatttcccatttttttaggctccatataggacctactagttcatccctcttaccatcaccagtgagtctatggattatcatagtttcaggaagtatttctaattggtcacagacaagattgatatattcatcttgttccataagagttaacataccattttgtaacatcttttccataggagtatcttttataacatgcaatagatggatttttataccgtctacacccattttaccaactgcctttgctgtttccatcatcatattataatcttcaccaggaagaccatttataatgtgtacgacaacctttatatttttagactttaatttttcaacaccttcaacaaatgttttataatcatgacctctatttataattttagatgtagaatcatgaattgtttgaagtccaagttcaacccataaattggttcttttatttagttcagataagtattctacaacatcatctggcaaacagtcaggtcttgtggatattgaaagacctatgacatcttcaagttctaatatagtctcatatttttcttttaaaacttcaagaggagcatacgtatttgtataggcttgaaagtagccaatatactttgcatgaggccatttttttaacatcatttcttttatattataaaattgactgataagattatctttagggtttccagcaaaatcacctgagccttctttgctacagtaggtacatccgccataaccaagacttccatcaatgtttgggcaggtaaatcctgcatttatagataccttaaaaactttttctccaaaagtatttctaagatagtaattccaagtatgatatcttttatcatcaaaagcatatttaaatttatccaaaaaaatcacctatttctaataaaattgtacgctgagcttgtacaaaaaacatattaccacaaatagataacttaaacaaattctattttaagtaatataaaaatacagcgagaaaataattaatattttctcgctgtatttccagagaaaaatagaactagtccaaataatattatgaaaaaagacattatcgatactataaatctagataaaaaaagtggagataatataaggcatataccaaatagaatcttaactatattccaagttgtaaatttagaataaggattattcttactatttacaagtgctactagttgattaaagattaaataaaaccctaaaaataatgaaaatatgctttgtattttttgaggaaatacaaaaagtaatatacatgcaattattagaacccattggatattaatagagggtttaatttcttctttagtagcatatctttttagttcattaatattttttaaatttaaatatgcaaagaataaaagtgcaataccaaaagtccaagaaattaattttatacctaatgtcttaaatgtaaggcataataatcctaagataatgagcaatactcccattaacataaatttagtagcattttcttttttattaaagttattaaaatcgatattaaaatttgtgtacataaaatcacctccaaaatcgatagaacaattataacagaaattcatatccaaataaagcctagtgtataaaaattaaactatacttagtaattaattaataggttgtatcatagacttctattaatagaattatatagaaggaggtttgtccatgacaaaattatgggcaataatatttgcattattagcaggtggttctacagctcttgaagcttttataaatggagaactaggaaaaagtacaacagcattagtggccacctttataagtttaactgtaggagcaatattttttttggcaagtataatagttacaggtgacttaaagtgtctagtatctataaatggttttaattataagttgttattaggaggagtatttggaggtttaataatatattttacagtaaaggcaattccaaatttaggagtatcaaatacacttatattaacacttgtatcccaagttttagttggattttttattgatagcgtaattttgggacaagaaacaatgcatttatacaaatacataggggttatacttttaatattagggacattctttatagtgaattaacaatttaatataatttgctatgcaactcaaaaatttggtataattatgttaataaaacaaagttagatgaaagaggtgttaaaattggctgatgaaaaatttgtaatgtcatttagtggtggtaaggatagtatattagcattaaatcgaatgttgaaaaaaggatataagcctgtggcactcttgacaactataagtgaagaacatggaaagtcatggacacataatttagaatataatatgcttaagcaagtaagtagcaatataggattacctttattagttgctgagtgtggtgtagaaggatatgaagagagctttgagagggctttaataaaagctaaaaacatgggagcaacgatatgtgcatatggagatatagatatagaaagtcatagaaaatgggatactgatagatgtgaagcagttggtatgaaagtagatttaccattatggcaagagagtagagaggatttagtatatgaatttatagacagtggattttgtagtgttgtaacaaaagtaaacttaaagcacttaggagaggaatttttaggaaaaaaattaactagagaacttgtggagaagataaaaaatgctggtgcagacccatgtggagaacatggagagtatcatacatttgtcgtagatggtccaatatttaaaaaacctgtagaatatgaagtaaaaggaactttaataaaagatggctatggatatttagaaataaaataattacataaataaaatacctattatataatcctaatttttgcaaaggtctaatatttgcaagattgtataataggtattttttatttagatattttcatatattgctactcttatcatctaagcaaccttatttagattagagtctaatgtagaaaaattcttttttagaaaaactaatgataaaataagacatataaactcagaaacaatagtagtcatccatattccttgtccaccaaatattagtatcattgaaattagacttaaaacaactattacaagccctctaccaagagatataacagtagaaattgatggtttttctactgatacaaagaatccagaaattattacattaattcctaccaataagaaagatatagagaatattttaaatacacgaactccttcattgaatagcattgtttcttctgggtgtataaataaagagactattggtcctgaaaaagccatacaaattgcaaatacagcaactgatgctattattgtggcttttatccccatttttaataatttttttacattatctatatttcctgcaccataataaaagctagtaagtggttgcataccttgagttatacccatcatagtcataagtactaatgtatttatataatttatgacactataataaataagagcattttctccaatatatttagtaagacttaagttaaaaagtaaaacaactataccacaacttaattcagtagttgaatcaggaaaacctataaatacaatttttctaagtgtcttaaaatcaattctaaattttgaaaaattcaaagtagagttttttcttaaaaaatgtattaagaagaaaatagtagaaaagacttgagacaaaacagttgcaataccagcaccttttacaccccatccaaattcaattacaaacaagtaatcaagtatgatgtttgtaagagcagatattattacaccaacagtagctaatattggaaagccatcagtttttattataacttctaaagaataagacactataaagaatccgttaaaaaatattattattcctaaataatctttaaccataccaattgtagattctgtagctcctaaaaatagtgctaatctatctaaattaaaaaaagttatagctaatataattattgataatataattattgatactaagttaaatgaaaagacttcgttagcagatttaatatcttttttccccagatagattgcaattatggtagatgcaccagttgaaaataatagagaaactgcaaatataaaattaataaaaggcattgatatattgacagcagctaaagccaattctccaactcctttacttacaaatattccatcaaccattgtatatagtgagaaaacccacattgcaactacagatggtgctaggtatttaaaaaatcttttacctagactcatgttttcgtttatagatatttttgtatccatttattatcactccctgtaaatctattataaaattacgaaactattaattaataattttatttctaatataaatgataaactatggtataataccaatgtcaacagcaaatagtatataattataaattttattaaataatagtgattttaagggtcttataaatatatcttatttatatattactgacatttaactgacaaataggaaaaaggtactttaagtgacatttaactgacaaatggaaaaaaagcactttgagtgacatttaattgacataaaactgaacattatttgaatagtattttgcttatattttcagatgtttctttatccatttcatctaataagtgagaatatcgaatatttattcatagctatttttatatctgcatgtactaatattttataaatagcttttatgttagtacctgaaagtaatatcaaagtcgcatttgcatgtattaattcatgtacttttatatctctaggattattatctcttaatagttttttaaaatgaacaacaaaagttggttgaactcacgggttgaatcttttatttaagcatatcaaatcaaattcatttttcaatataccctgtaattttaacttattttgttttaatttttgccctttaagcaaacttataagttcatcaggagcaaataattttcttttggatctagggattttagggtctttgaagattattttattgtatacataaactaatgtttgatttacatgtgagattttttatcaaggtctacatctgaccatataagtgatacagcttcaccaaaacgtaatccaagagttagtatcaaaaaaattggtatacctataggaatattttttgatttttctaataataattgagtttcttgctttgtataaaacttagaagttgaactattttttttgattggggttgtaacaaaatcacaaatattttctgatatttcttttaatctataagattctttcaatactgattttataaaatcgacttggttttttattgaatttaacatgtgctcattgtatatgttatttatataagactgtaaaatagaaggcgttatatctattaatttcatatgttattggaaaatcgaataataataacttggtattcgaaacttttgataaagtaataaaactacatccaaatgcaaaacctgtttttcatagtgatagaggttttcagtatactagtaaggtgtttgaatcgaaacttttagcacaaggtatgatacaaagtatgtcaagagctggtcgttgtattgacaatgctcctatggaaggaatttggggaattttaaaggtggaaatgtactatttaaggaaatttgatacatatgaacaattagttaaaataatagagacttatatatattactataataattttagatatcaaaagagattaaattctatgtctccacttgaatttaggaaatatttaagtacagagatagcataatttattttaagtagctctaaaaaaatttaaatatctagggttttatttgacgtgctcttttttagatagtaaactttaaaatatagatattaattatatgaatataataaaaaaagtactaatgagttacactagtactttataactacttttacatgttttaactgtataaaacagtgggtatagttcagcaggagtgactttagttttgaactaaaaatcaagttcaaaaagaataaacattagtatttgaacttcactctacgtctaaatagattgtagttcttcttgtttttattataccacaaattggtacagatattcaaaaataatatatttatgatataataaaaatgtaaatagttttgcagtgagcgatatttgttacaaagtagggcttaatgcttgaaatataaggtgttgagggtatatgataaactttatcatttgcactactcatggttcactgcaaatttaagagagttgcacatgtgtaagtattgaaaatgcccagtttattttggggtaaagttttatattaactaagtggtatggaaagaggtttttcagaagtatatgtacgtctatattgtaaagttttatattaactaagtggtatgtaaataaggaaggtggaagtcaatatgcatgggtcaaatgggttttatattaactaagtggtatgtaaatacgaaattagagtttgaaatatatgactacataatagttttatattaactaagtggtatgtaaatttgtgtcacatcattgtcacttctttagaatatcaaaagttttatattaactaagtggtatgtaaatttttaagcaggtgattaaatgattaaaaaagtagaaaagttttatattaactaagtggtatgtaaataataacttgtcaatgtagttatatgcaacaacttctatgttttatattaactaagtggtatgtaaatgaattatatattatgaaaaaatatggagtcacagagggttttatattaactaagtggtatgtaaatttgcaggttttccttatagtttgccatatgttcctggttttatattaactaagtggtatgtaaattactttagcactagtaaaggtagaattattaaagtgttttatattaactaagtggtatgtaaattcgaatgtgaatggcacttctatttctccaacttttggttttatattaactaagtggtatgtaaatagtataatgttgaaaagttagagagtacaatcaagaaattttacattaactaaaatgtatagaataaaacatgtatttatacttaaattctgtacctatataaaaaagtgaactctgtcaacaaagcacttttttatatagataaattatcattttattttaagatagaagatactaatgctaaatgtttatcattagtatctgtatgtacataaaagtttaattttttatataaatttgatctttagaaaaatgagcagtatcaataaatatattgtctaaattttttctaggaactagttgactagctataagattagcttcaactctttgattgttagactatgaaattaaatctaaaggttcattcttggtcgtataaatagctttatcattcgtatgtactataacaatttttgccatctgcttttgatagataaagagctttatcagctttagaaaataaatctttatataatttagttgaatcatcagtgaaggcaataccaatacttaatgttattttatgattgtcctttacttttattttacttgcatcatttaaaatatcattagtaatttttattattaaatcctttgttaatgattttataaatattgtaaattcatctccaccaattcgagcaactatgtctttatcatgtgtgttatgtaatagtatttttgatacagcaactaaaacttcatttccctctaaatgcccaaaagtatcatttacagttttaaaatcatcaatatcaataactaatagagcatcattatttttggaatcagaactacatagatactcttcaataagattttgtgatactctttgattatataattgtgttagtgggtcacgttgagcctgattaattaagctttctaatttagatttatcttcagttatgtcttttaaaacgcctattgttttgatagggttatggtcactatcatatataactgaacattgaacacgaatccatctccattcatttttagttaatgaatttacttgtcttatctcaattgtttcacgaagatttccatgaagtacttctagtagttttccaatatcatcaaggtgaataattttaccagattctaatagtttggagtaattttttgtttcaaaattttctaattcaatttttttgtcaatttctacacgttgatattttataagggtatcgttttcaatatcatactcaaacatgatatctgtaatattttgcaaagcaatacgatatcgctctctttctaattttagttcagattctatgttttttagttgggttatgtcagtaataatactattaatttttactatgccatcactatttaacgatttcattccagaatctaatacccacattaatgttccatctttttttcggattctatattcagatgaatatgtaggtccttttgcaaaacatcgttcacaatcttctagtgctttaggtaagtctggtggatatacagcacccactgctgaaccaccactcatttccatgaactcatcatatgtgtatcctaatattttgggcaatccctcattgacatagaaaaatgagtatgtactatcatcattgctaccttttaagccaccattgatattatttgtaatcatttcaataacttctgttttttcctttagtaatctttgcaaataatcataactttgagttccaattttagtgggaaagtattcatcaagttgcatttcaccataagggtttgatatgtgcatgtgctttactaataattttcctctatcctcaattatctcaaatgtacaacgttgatttacctctaaaatcatttgagcattttctttagttcgaacagtatatcttcctaataccatacatctattctcatcttcacttacagtttcaaatacatcattatttatatcacaagaaggaatttcatcttgacctgcataaaaataattttttatttcattaaaagaagtgagaaattcctgttctcctggtccaatccatgtaacattttcacaaaggtattttaatacttcattgatatctcgatttatataaaaacttgttataatatgttttgctaatttgggtgctttttttaggagtatgctcatgatattcctcctttctttttgctattatattttaattatattatacatcaatatatttaaattaaaagctttgttaaactatgatatctttgtcaaataagttaattttaacaaaaaagaactgaaacaatatatgcttcagtacttaatgtcaatatcttgtatagatacatatttataaactaatgtacaagtttaaaaaaagaaagataattttaatttattttaaaataacaatgttaataatcatttttatcaaattttttcttgtttttctccttgtttttatacatttttttatccaattcaactattgtcaattttaaatttctttttactgtatcaacaccataactaaatgaaagatacttatatttagagaatacttttaaaaaattttctcttaaggcttctagttgtgaataaacataatttttgtcaacatcactagagaatataacaataaattcatctcctcctaatcttataatagaagtagaatttattaattctttatttaaaagtgaaacaaaatcacataaaatcttgtctcctacattatgaccttcatagtcatttatcattttgaaattatctaagtcaattagtacaatataatctcctataaatatgtcaaatctatcatttaaatattttctattatatgctccagttaatgggtcagtaattgagtagtgaagatttctcttattttcttcatagagttttgttatatcattggccatagtaattatgtaggttttttcatcaacatctactttgtattctaaaacattccaatagcttgtagtatcttttttaaactctaaaatccaatttgaaattttatcataaggataatttttttcccaatctaattgaatattgtgagaatccgtaaaaaatttagcaatattatcagggagtttcttagctatttctatattagtcattccaagtggattatcttgcatataacttttaattaaattttttaaattatcatttataaatataattctgtagttagaatctcttataattagaaatcctggaaaagttcttaaaaaaatttctttaaacatattaatttctccaaaataaaatactttgtactagatttttgttaaattttttattttatttacatctacatacataccttgggcaatcgaccttccatcaattgcagaaaggttacattgtgtatacataactgtgacaatttgaccatctcgttttatgaatctatataaaaatggttcaattttatttgtgtcaatcatatccaaactttttttataaacaaagtctaaatcatctggatgaacaattgctcttaaatttccgcccatctcaccaaaaaactgttcttttgtataacctataatgtcaaacatttcttcattcatataagtaataatcatatcaccaaataaatcgtagcgaattatacctacaggcaacattgaataaaattgtgataaaatattactttcatcaagatgtgtatttgtcattttaggtattgaatatgattcaaattcatttatatagccagcagttttaattaaatccaaatgtaattttgctaagagtaatttattttctgaaattatacaatttgcactaaagtagaaattgctatatttttgatgttcagaagcttcatctgataaaacggcttctccactaattaataatgaatctgattcagtattatgtggggttatacttttgtaaagaatagaaaattttttacctttaatatgtttttcaaaatgttctattactttaggaaaagatgtaatttcagttttgttgtaaaaatcaaaccattgaatgtcttcagtgacattagctcttagttttttcatatcttgcataataaaaaatccatcaaatatcttctctattaaagattttcctatatcagaatattttataaacattttctctgaattattctctttagatagtaatttttcaaattctttgcactccatgggttttgcataataataaccttgggcgatatcacaatttatacttttaataaattctacatgttgttctgtttcaacaccttcacatactgtaagcatcccaagagctcttgcaatgtttattatagagtacaaaatggttgtatttttaaaatcatttaaattatgagataaaaatatcctatcaattttgattatatcaaaaggtagattttgcaacataccaaaagatgaatatccagaaccaaaatcgtccattgatacagaaaaaccataagaacgaagttcagctagttgttgaataattgtatttgtattttctattaatatattttctgttatttcaatgctaaaatttgatgtagagacgctgtacttttcagtaataccttttagcatacttggaaaattagggttaaaaaaatgaagacgagaaaagttacaacaaattggaacaaaaacatcattgttatcaatccatcttcttatatttttacagttctcttcaaataaatgcaaatctaattccgttatcagaccaaactgttcaaataaaggaataaatttatctggagtaagaagtcctttaatagggtgtctccatcttgcaagtgcctcacatccaactatagtattattttttatattataaagtggttggtaaaatacttcaatttgtttagtttgtagaacatgtgatatttctgataagaactccttatcattttctaatttattgtaaaaactattatctttaaaatcaaatagaatgtatctatttttgccttcacttttagccttttttaaagcactatatacttggttgaaaagtatcaaagtagtcatgtttggttcaccattccagatagtgctgccgatactaaatgtaacattggagtatatttctttttcattaggaagtcttatttttaattctcgggagctctctataatagttgcacccatattatttaactctttatttgatacatttggaagtacaattaaaaaaccttctccttttaaataagcgactattccctttgattctggaataaagtgcaataggttttgagttagagtaattaataaattttctccgactagatatccatatatatcattaaataatttaaagttatcgatatttaataacatgattcctatatgtatatttttcgaaatacagtcatcaatatattggtacataaattctctgtttggtattttagaaaaaaaatctatttcatttaaggtttttaatttaaaatttctactatctaattccttagataatacttctacctttttatttaacatttttatataattatgattttgcatggtattcctccataagatactttaaattttgatgacaactgtatttatgctagaagtatttaaatgttaatttgtaaataatttaaatgctaaattttaaataagtatttaaaatgaatatacattaagttatttgctccaatgctacaaatacaaatattttttagtttagtaataatattagataaaattagttaatgcttaaattatagtatattgaaagatttcctttttgaatgcaattatatcatattttttcataaatagatagattgtgagctgtatagttagtaaggtagagtttttttataattaattttaagtttaatgatttttcaaaggcataattattttattcataattaactttttatacataatttaataccacataattaattttagttattaaaattaagtttattcttgtattttttgttaaagactataataaatattcatttactaaatttataaactattaatctatagaaatcagttttaatatgaaaaatattacatagagatggatataatagctgtaaacataaaactatataaaactaaaatatatttataaaaaagttgaagttataaatactatacctaacattacaatataaaaatattttaataattaattattaggatgtttattttcctatccttgttttaaagatttttttagtatattctaatattatagtattatagagtaataatgttgatttaaaataaaaataggatttcggaggagtttattatataaatgaaagattactataaaataggagagatatctaaaatatatggaataggtagagattcattaatgtattatgaagaaataggcattctaagaccagttagagatataaatggatatagaatgtataatatatcagatatatggaaattaaatttaataaaagaatttagaagcttgaactttccaatgaagaaaataaaagaatacctagatgacagaagtatagagtctacgaaaaatattttaaatgaagaactcgatttaattgataaaaaaatagctgaatttataagccataaggaaaatattataaaaagattgagttcgattgaaagtgtaattcaaaatacaaaaatagatgagatagaggttgtatatatagaaaaaagaaaagctttagaattaaatgctgatataaagagggatgaagacttcgattttttaattcagaaacttcagaaagaatatgaagatagatttaatatacttggaaacaacaatattggttctgccttttctactgaagcaattaataaaggtatatttaatgagtttaaatctgtattttgttttctggaaagtaatgagaaagtatataatatagtttttgatgaaggatattatgtaactttaaattatactgggagtaattctaataataagatgtatatggagaaggtgtttaaatttatagaagaaaataattataagataattgctgaccctatagaaatctataagatagatatacatgagactggaattgtagaagagtttgtaacggaaattcaagttcctataactaaatagccatatttcaatggattagatggtaaatagaatgaaaaaatgttgatttgccaccgatttgctactgtgttataaaatcggtagcaaattatattttaaattataagatagcatgaaaaaataattgtttagggggttataaatgtgaaatgttctaattgtggaagtgtaaatattgaaaagggtattttaacaactggtggcatatatgctgaaactattggattaaaatatagaggagatggaaaattagataaagttataaataaaacttttccagtacaatctactatatattcagatttatgtttagattgtggcgaaatagttagaacctatataaaggataatactgataggaattggtgtaaagataagaaatagaataatttttgaagtatattaatatttgaagttgaattttattaaagatacaagtgaaaaagtataaatgggaagaaattgttatatggaagaaaactttgcatataggggagattagttttttaatataataacatttttaaatgtagataaaactaaaaagggttctctagaaaacaatttctatttaattatacttacttaccaataccatcacttgatgtaaacaagattctactacattttctccgtactctagtataaaatcatctagctgtgtatctataaaatcacaataatcatataaactactaatataagcagttaacatgtgtgtacatttatccatttcatctctaaacatatatattactatccccctaaaaaactttcataaaacaaaaagaacaatatctttttggcaactggctgacataactcatagtttattttataagcgttagtccctatagctttgcgtcactaaatttctctagttttgccgatttagttttattctacaactaaaataatacactaggataagttattgttcaacatacttgtcagaaaattgaaatatttaacagtatcttaacaatatgaaatctatttttcactcaagaaacaaactatacatgtagaatatttaataaaaattatatttagttttgtattgaagtttttgtattaaaaagtttagttcacaagagttacttggctagataatagatgagcaaaaatatcttgaaaaaatatatatgaatggcaaaaaacaagggatgaattttatatagactcatcccgtaattatttatatattgaccttgattaaatatattattatttttaagcttcaatttttatattatatttctaaagtttctataagaggattatcgctaaataattttaataaatttgtttttttatatcctttaggtaacttagtatatataactacttctaaccaatccccatcaaggcgtttaatattcatgtttataatttcaatattagattttttaaatttaccttcaatatattctatggaatcagtgctgttagaaattttaagagaaacttgctctgctgtagggagtttcatccacttcctatctctatgaagtgttatctgtacaataacaataatgatacttgaaacaataccaactaagtataatccagagccaatggcaagacctgtaccggctgttgcccatataccagcagctgtagtaagaccacttactgattgatttctaataaatattaatccagcacctaaaaaacctataccactgacaacttgtgctgcaacgcgggctgggtctagaccaatacctggagtacccactatatcattaaatccatacttggaaacaatgattataagtgctgaagctaatgccactataaaatgagtgcgtattccagcttcttttagtctattctttctctcatatccaattaaagccccacagaaaccagcagtaatgattcttgctatatattcaaattgaatcaatatatgatggttcatttatctagcacccccttctatataatattatatatactataatactacattttttatgtgaatatagtaaagtttaaaatttatataatagttatatatgaatataaaatgtataaacgtatattatgtatataaaaatgatagaaagcatctaattttaaatgattaaagagcaagcttaaataaatcaaacttgctcttttaacatagtgtatgtttttatttgtgatagttagataaaaatttatctgtgttttttacatctgcaaaactgttctgtagtgatgccatgaatacttgatgtacagtatttgcattaatttctatattattccaagataaattcttcgttgtacatgcatcgcttattagagttatgtcgtatcgaagtttctttgctgttcttacacttgtatcaatacacatatggctcatcattccacagattactagattagtaatattttttttctcaaggatactttgcaaatctgtttcaaagaaactatctggtgtgtgtttaattataatttcttcattatctagtggaaaaacaattttatttatttctgaaccatgagtattaggaagaaaaaaagaagctgttttatctgttgatatatgctgtatatgaataactggtaaattgttttttctaaaaaacagtagtatttttttagcattttcagcagtttcttctgattgaaataattcacattttccatttttaaaataatcattttgaatatcaatcaatattaaagctatagacatgattataccttctatttacttttattataatactattgtaaaaaatgtaaattacttactttttggtatgtataggattacttattgtagcaaattcctttattatctagaatttcttgttgaccatgttcaagcatatattcgattcctatttcttgcattatttccactgcttttaacatttttttaccacgattagtaagaaaatattcaacatgtaatggatatccagcagaacttattttatcaataatcccaaaatcacgtaactcttttaattgttgaatcaacattttttgatttattccataaatattatgttgcaattcagaaaatgttttattagattgtcttaattcaaatataaggatagttttccattttcctttgattatgtcatgtacaatttcaagaggacatgtatattcagctcttattttcatagcatatcacccccagtaaaatgataataaattatatcacttgtcttgtgatatgacaaatatatatgaactgtatataaattttatgttttattaagttctaaatttcttctattgtagttcatatttagtacataaataattagtaagatataagtaaataaatatataacatgactatagaaatttaactttaaaataacttatgataatttagaggaggaatatatatgaatatatcaagaaaagctatgaaaataatagaattagcacaaaaaattgcaaataagagaggtatttcagtagaagaagcttggagtgaagcagtaacagaatataaaaataaatacgaacatattgcatagatatttaaaaatttagaatatttggtagaatataatgattttaaatgatactataaattataaggtatatcattattaacatagaaggaggatatctgcttgattgtaaaaatagataatactttagaaaaagaattttggcaatatgtatcacatgaagaaagtttaaatttattcataattggatacgttgagaattatggatttagctctcaatatcaagatatatggtctcaggtagaagatggaaatataacctctataatattaaaaaataagtcaacacttataatttatagttttaaaaataattttgatataggagaaatgaagaatcatataaaagatttagatgtagaaagcataagtggaaaaaaatgtgtaatagatagactaataagtaaatacaaagatttttatgaaaaactagataataaattttgtgtattaaaagaaataaaagaaatagatttttccaacatgaaggagtataaaatagaaaatgctcaggaaaaagatattgatgaaataggaaaacttttaaataggtcagactataaagtaagtaaaaattacatagaagaaaggaaagaacatttaaaagagggaaatgtaagagcatattttattagaaatgatgatactatgattagcactgtgtcaactggtatggaaactagttttttggcaatggtggtctctgtaagtacagataaaagatataggggaaaaggacttgcaagttatatggtttacaatttgagtaaagaattattgttggaaggaaaagttccatgtcttttttataataatgatgtagcaggtaaaatatatcataatataggatacaaagagataaatgaatggacaattctttttaaatagctataaaaataataaattttcgtgtaattcttaacgtgtattgtataatcgctcaaatacttgaaaggtgtctagtagatgggtttgttagcatttatggtctccttatctaagtaaagttccctttggaaatcggtgaaatactcttttacatttcatgagtcctataaaatctatgacataagaaagacccagttacattgagtaattgggtcttattatcatatatattgtgtgcttacatgatatagttcatttctataaacgtagtatttcgtaagtgggaaccaattttttaacaagtgattatttgaacaaagcaataaggatatgctagcagatggattttgtataatttaaaaatcaatatttagactctatcatgtattttcatcatcataatccaatttgaaattgtatctaaaaccagtttgctatttccacagttacagtggttactagcttgttctgcttctgtcataagcctaaatgtaagggatcggacattgttgagtaaatcaatctctttaccaacagttctataatcaataaaatgatcttgtgttgcacctaaaatcaaaatgtcttggtttatattttttgcaatagaatctatttgataatacttgattttctgaaaatattcatagggtgtagacgcttcatatgcgtacattccatgttttaaaccccataccaccatactatcgccacttttcattttttgctttattataaaattgactagccattttgttttgagttttagcagtagtctaagtagattttgcatttttattggttgtgaaccaactattatgtctaagaaattggggaatacagaccaagctaccacgcgttcaattcgtttttcgaaggctgctgctcgtggagcaagaaaacctcccaaggaagcacctacaatagttatattctctaaatgaaaataatctaaaattgtcttaacgggacgttcccattgataagtaaagtgttttccctgcaaacgcatcactccaccttgaccaggtccctcaaaaagataaatatcaaatccctgtgacgcaagataaagcattgggaaaaagaattcttcaaagtaagaatcatttccaccgtggagcaatataacatcttttacctcgccttgcgcttttgcatacattacaggtagggtgatattttcatatggtacatgaaaaatttgtacagttccatttgagaaatattcagagtagtagttgtagaatagagtagttgcttttttgtagactgatattttatcagggtcaccatcatacataaaaaattcactcatacgatagtaagcaattgcattttctgtgcgtccatcttgttcagcttcttgtgccagatacataagttctgttttccaactttcgctatcgacaattttagaggaaactttttgtatatcttccaagcgccccccatcccacataataatcctgtttaactgaaaattaaaattggcatttgtattaaggtaatatagacctttattaaaagaaattttatttgttttcaatgtcatcactcctaaaaagataatgcatagcaataaagagtaatctttaatgctatgcatttattgtaacaaatattagaagtactgactttcaaatagacgctattggcggataaaatatattttacattttcctataagctcacttgcagtaatgccaagatattttttgctggaagctgagaaatgagacggtgaactaaaccctgcgtccatagcagctgaggtaatatctccactttttaacaataactcataagccttgcgaagttttgataaagccaaatagctgtttagtgatactcccatttgttctttgaaaagatgagaaaaccggcttttggacaattttacttcggcacatatctcaaaaaagatttcattgtgaatgtgtgtggactttagaatatgattcaatgcccattgtattctactgtctgtaatagacgaaatatgataatttaaattcaatagacggaaagcttgttttgaaaaatcaatatagctttgggacaatccttttacctgacaagctgtataaatattttgtattcgttcaactataagattatctataacgaaaaaagagtgatttagtaattggtgttgactaatattttgggcgagtatgcttgtatcatctatcaagaaaaccaacattttattatctttacttgacaccgtatgcgatacattggaatcaataataattcctttacattgtaatgattcgcccttatcaaacgtcacagataagttaccagactgtgatataataatatgttttgcaagatgtttatggatagttggttgtctatactctgtatctaaaaatatatggtcaatcattacacaaatggtagtcatagctgtcaactccttgttcatagcttagcatattatacagtttttaacaagaaagcttagtgattacaagtatttaaaaatcctattttaggcaatgaaaaataaaaaactctatcgagaattaaagtatttataaataactatatttttactatgattcatgatagagttttttaaaatttatgatactattttttattatttaaataatcaagtgttttaagtttataaccttctttttcccaatgtgtaagaacctcatctaatatctcagtatttgttgatgaatttggatgcagtaaaactattgcaccaggatgagttcttgaataaattttgtttttggcaaattcatgagtaggttgtttcttttcataccaatctacataagcaaaactccaaaatattgatttatatcctaaatcttgtgtatattttaaagattgttcgctaaatttacccattggaggtctaaaatacttaggcatttcttttccagtaacatctttgtatgctttttctacacttgtaatttcttctttgaatttttcaaaatctgtaatacctgccattgatggatggctttttgaatgattacaaactaaatgtccttctttttccatacgctttattaactctggattgctttttatataactttcaactacgaaaaattgagctttagcattgtgttttttaagcgtatctaataattttggagtgtttccactttcatatccagcatcaaatgatagatatataactttttcattgggatttcctacataataagctccgtattttttaaaaaaatcagcttcttttataggtgatggctgtttaccatcctccctagggttaaaataccaatcatattcatgtgtgtcgagtgttggactagaaatttgagtttttgttttatctaatgatttaaaatttatactagcaattccaaaaagtattagagcaaatgctcctatcataatgtatttttttaggctatcttttttcacaatttcacctcttatttaaaatttaaagtatatttcttataatatagtttgaatatttatagttaaaaatattcacatatacaaataataaatgaaagaagtttactgtaagatataaagttgatattaattatcttaaataaagtgtatataaatgataaaatataaagagaaatgattgtaaataagttaggctggtttaacttgaagggatataaaaatggataatataataagtgtattgaatgatgttgtttttttagatatagaagttagtggattagattgtttaaattcagaaattttagaagttggagctgtcaaggttaaagactggaaaatatatacctatgaatcattaataaaaaacaaatttgaggtacctatagaagtattctcagtatgtaaaaatttagataaaaatgatttagaaatagctaatgaaatagaactggtggaagatagacttgtaaattttgtagaagatagtttcattatatgtcatgatttaagtctgaaaaaaaagttttttgagtatcatatgccaaagttaaaaaacaaatttattgatttaattgaattagcagttattttagaaccatatcataaagattatagcttagaatacttaaaaaatactttaacaaattgtaattctaaagtggaaaatagagctttatcagatgctattgatataataaatattgtaaattgccttttagtaaaatttaataactatgaaaaaactactttggagccattgagttttaaaataaattcatatcttaaaaaatttaatcttccaacatgggaatggagcaaatttttagaagaggcaaattatgatttatcaaataatataaatataaaaaaagaatataatatatttgactcaaaagaagaaaagaagaaggaaagagaaaccttaaaaattttaaatgaagaagaaaaaaattatgaagaattattaaaatacaaaactatttgggagaataaagaaggatttacatatgaatatagacctggtcaatatgagcttactaaaacaataagagagttgtttagaaatagcgaagatgaagaaaaaattgcatgtatagaggcaccaactggtataggtaaaagtgtaggatatttattgcctgcaatattagaggctagaattaataaaaaaagattattaatttctactgacacaaaggaattgcagatacaattaataaataaagatattccaaatgtgttagattctttgggtctaaatggaaaagtaagttacggatatataaagggaaaaaataactatatttgtatagatagactggaagcatatatagatgattatgagtctcaaaaccctactaaaggagaaattttatctttaatatttttgaagagattagttgaaggtggcaagtatggagatatagaagaaataaattatttagtgtttgacaacttcaaggaaataagtacccacttaagaaatgtaagttgtgacccaaatatgtgcagacctaaaaaatgcaaaaaagattgtttatataaaaacagaatagaagaattaaaagaagaacatataacagtagtaaatcattcactattagctaaatggccgtataaggatgaaaaacctttagaaaatataatagtagatgaagcacataatttgactgaaaaaggatatgatttcttttcaagcattataaattcaaagtctttaaggtatttattacaagaaatttatccttacgagtttattcaaaatagtagctttatatataaaaaatatagtagaaatatgagaaaaataaaggcttttgataaattttataatgtattaaaaattggaagagaagataaacaaaaaattgctagaagtataaatctcattattgaagagatagattcaatattaaagtttggtaattgtaatgaatataataatgtaagtaattataatttaagatgggaactgaatttgcaaatagatgaaattgtgggaaaactaaaaaaggatggtatagatactgaaataagttatagagcctatagtgaaaagataaagttgagttgtgagaaaataataaaaaatttagtttcaataataataataatttataggaatattgatgatgatagtatagataaagaagcagatatatataaatttggaaaggcaaagacaagagatttagaggatataaagattatatttgaaatctttttagagtatgatgaaaaggatgattatgcaaggatagttgaaattgataagaattataatgactttgaatttcgagtagtaccattaaaaatagcagatttatttgaagaaaatattttatctcaattagaaaaaggaatatttttatcagcaactttgagtttatctgaaagtatgtcttattttaaaaatacattaggaatagacagagttaagaatgtggaaaagattatagaaccaatttttgattataaaaatagagtctctgtagttggattttctgatatttgtgagtacagaaattctgaatttccaaatgagatgagtaaaattatatctaatatatcaaagattacagaaggtcatacattagctctttttaatagtaaagatagacaagaaaaaacttatgaaatattgaaaaaatacttacatagttttaacttagaaatttatgctgataaaaaggggattagacaccttaacgatttaaatagaaaatgtgtagtacttggctcaaaaggatgttttgaaggcgtagacattccaggggatggtttggtttgtgtaactttagacaagcttccgaatctaaatccaaaagaccctttgtattttactataatgaagaagtatggtatagactactatactataaattatcctcaaatgaccataaaggtaaagcaagctatggggagaattttaagaagcaaatatgactatggatgttttgtgatttttgatgtaggaactaatataagtgttttaaagagattagagaaagatttacacgattgtaaaatttcaaaggttaatagcaatgagttttatacttatataaggcgacatttaaataaatctagaagtttaatactaaaatctgttatatttgatactataaaagcgttgaatgttgatgctaaaatggataacaatgatgttgataaagatattataaaaaaagatataaatgaaaatataagacaaagagctgtaaaaggagaagtgtaccatattgatattataaaaaaagatatgaaagtaaaatattttgatagaaactatcttataaatttagatatatttatgagagaagaagataaaaattaagagtgggagtgagatatttggcaaaacaaaagttttatgctgtgaaaaaaggtaaaaatataggtgtatataatacatgggatgagtgcaaaaaacaagtaaatggattctcaggagctgaatataagagtttttctacttttcaagaagctaaagaatatattgatgggtcagaaaaattgagttttcaagaagataaggagtttatagaagcatatgtagatggaagttatgaacattcagtaaaaatgtatggttcgggtgttgtgattttaaaaaataatgaagttataaaaacttatagtgaaaaaggaaaagagaaaactttagtaagtatgagaaatgtagctggagagatagaggcttctaaaattgcaatgcagtactgtattgacaataatgttcaaaacttgattttatactttgactatgaagggattgaaaagtggtgtactggagtttggaaaacaaataaagaaggaactatagcatataaaaatttctatgacagtattaagaataagcttaatgtaaaatttacaaaggttaaagctcattctggaaataagtataatgaggaagctgataaattagctaaaaaagctattggtgtataataaaaaaatatttatacataattacatggtataagagtatatctaaattcctactttataattaaacaacttgtaattaaacaacttgtaattaaacaacttataattaaataaattttgattaaaaaagcagattgtattatgaaaaaataagtatctaatttataaacaattaataatagtattaattagatacaacttatttaatataataaaatctgctttttatataactataaaatcttcctacattctattagaattgcccataaataccttcaagttcttcttttaatacttcagggtcatttataccaatagacatggttctagccagtatatttgcttggtcataagttgatgtccatgagaatacaccacctagacaatttctaagaacatattgagtttttaagaatattgataaagcatcatcatatgacattgcaaaatctccatccttaactaaatacggaacttgagcagtattatcaaatctatattcatatccatttttatttatataatcccttctaagctcatcataagttcttgttatagtggcacctaatcttccataaaatggtataccgagaaggattttttcagaaggcattccagcattctcaagatttctcaccattgcatcaacactatatcctggcaaagataagtctgaatcaaaaagatttgcttgatgttttctaccatttgggcctgtttcacctgctgtaaaatcataactcataagattaaaataatctattataggagctattttatctatttcagcacttgaatttatatatcctctatctcctgttccagctacactaagccatttatcatctcctataacatctcttatggcagttagtaagagtgtaaagttttctctatcttgaggtcttgatgttattccagatgcactacttccaggatattcccagtctatatctattccatctaaagcatattcatttatcatctgattgacctgtcttgcaaaattatatctagatgtaggtgttaatgctgcatcagagaatccttcagctccccaacctccaatagctacaattacttttaagctaggtttttcacctttaagagcaagtaattgatttaaaaatctaggataaggaataaacaaatttccagactggtctatctcagcaaaagcaaatataactgcatctaatagttgagcatctacattagttggatttccaagaacatattctgctacaattggatttatatctggacagtttgcattttcaactattggattgtatgggtctgttatttgtggtctaactaatttttttgaatcttttaaagttttcatagctatttttttagtatttttttcgctagtataatcgtagtttttataattatgtttatagaaatcttcataactactatcttctttgttatagctagaatttattttgtcgcaagattcatctttatcatagttaaaattcatttcatcacaagacttatctttaaacttatcttgtttggagttgtgaactttgttagtatttttagtatgttttttctcatggttgcaatcatctttaatatcagtcttgtgttcttgtttacagtcaagagctttgttcaggtagtcatgatgttcatgttcacagttacattcattttcaatgtttttagtatgttcttttttccagctacaagtattatcaattttcttgctcacttcttcatcattataattatctggtacaaaacataagtaccagtccatacatgaatatttcttattacaactgttaactctattttttaattccttatagtttttaggataaggtaaaatcactggcattccaggaaaccagtttgcaggagtaactatattatctctatcactagtctgaagtgcatctactattctaagtatttctggaatatttcttcctgtagttagtggataataaagaatcgttcttagaatttgattattatctataataaatacagagcgaacagttgatgtatcactcattggttttgatatcatgccgtataacttggcaattctcatatctctatcttctataataggaaatggaatttctacacctgtaagtaaagaaatattatacatccaagctaaatgtgaactgttactatcaacacttagaccaattagttctgtatttctttttttaaattcgtcataatatttagcaaaacataaaaattctgtagtacaaactggtgtaaaatcaccaggatgtgaaaataaaacaatccaattacccttatagtcagagagtctaataggaccatttgttgtattggctttaaaatcaggagcctttgaccctaaacttggcaaatttggcatgtaaatcacccctcaataaattatcatttattttattctattaattaatacatattagtgttactattttattaaaagttaagtaatccttatgtcaaaaaaagatatttattaaaaagatttaatattttcctaatataaatgacaatagtaattgctatttttttactaatttggtatagtaatggataaggggtagtgtcaattttagtgattatacgaggtgattggattgaaaaaaattctaagaattttagttatctccatgatgatatgttttgcaatgacttttgcattagtgttaataaattcagttatgggagtacatataggattggattattactttttgatgggaagtgtgcttacagtttgtttaacaattggaattgttttatgcaatgctagaaaaatatttgatagcaaagctatacacaagacaagaacgaaaactgtcagtactaataaaaaacaaaagagtcattctagggatataaaaagaaagatatcataatttatgtaaaggaaatatttatgtataaaataatgattgataggtaaaataaaaacacgatttaacttgtgtttttattttttttcaagaattatgatataataaccaataagaaatttagtttaccataaaatataaagattattaaatggagagggaactataatgaattttagagatttatttgagaaggctgtagattttattgatgaaaaaaggaaatctatagttgcgatttcattatcaacattaggtgtaattgctttgataatagtatttttcttaagtagtaacgagtttagtgtaggaaatgaagctaatgagttgttaaagattatagagaaaagacagtattctatagctgttgattactacacaagtatagaaaaaaagttttctgattcaaaaatggaaaggtttaataagtctgtttctaaaaaaataaataaattgctattaaatagtggtgataaatatttagatggagacataagtcaagaaagttttattggattaataaatactgtgaaagaattaaacaaaataagtatagatgtggatgacttattagctcaagctgatagagttagagaaatgtataaagaagaaaatactacttatgatattgccattaactacataagtactgtttcaatattaaatggtatgggtagtaacctagatgtatacaaacagaatatagaaacaatcaaagagtctagagatgtttatgactcagcagtaaaagaccaaaaagcatataagtattatgaagctattgaaaagtataataaagtattaaaagaagatgaaaagtattacagtatggctcaaaatgggaaagaacaatgtattgaagaaatgtatgattactatataagtagagctgaagaggcaaatacttctggagattatgaaagagcattacaatatattgagtatttaaaagaagattattcagatgatgaaaaggtacagagtttagaaaaaaaatataaaaagaatttatcattgtataccttaacatctgatgacattataaatgtaatagctaaaaaaagtggcaaagacaaggcaaatctatctataaattcacttccacaaatgataaaaaataataaatactattatgctgaagtatatgagtatgataaattaataaatgaagttttggtaagtgcaaaaactaaagatttatattcgtataaagatggtaaaaaagattacaaagtagattatggtgatggatactttagaatattagaagatggaagttatcaatttggtattacaaaagataaagctaagtttgtgttaactaatactcttgatgaaaaagaaaataagtataaaaagattgagatattagatatagagaaagcagatagatatgtaaaaagtaaaaagagtttagaagaattgtttggaaaatataaaaatatttattattatgctgtagtaaataaaggcttatttagaggcaaagaagtttatgctattaatatttacaatgaaaaaatatatgccatatcagaaaatggactaaatgaatattaattaataatattaaattaatatataattaaaaagtttttggggttttaaggcgcattatgtagtaatataataatagggatatataaataattttattgtaaggagaagtatgggatgagtaatgtgaacaaaaagctagttatagctattggagctgtagcattagtagcaataatttttataggcataatgtgcatgcaatttaaaggggagaaaatagcaaaaaacacatatgttaatggagtagatattggaaaattaactaaatcgcaagcaaaacaggaattagctaaaaaatacaaattagagaatgttgagtttaattacaatgataaaagttggaaagtaaagagcaaagatttaaatttatctactgatctggataaaacagtagaaaacgcatataatttaaatagaaagagtagtttctttggcaatctatcaaaaactatttcaacaaattttggcaaaaaaagcaacttagtagttgtgataaattatgataaaaataaattaaaagcagaaatggaaaaaatagctaaagaaatagatgtagatgtaaaagatgctacacttgatataagtggtgaaaaagtcaaggttataccagattctgatggtcttaaaatggatatttctaagagtatggagaattttgataatcaaactaaaaaaggtaactataaaaatgagttagtagtaaaagctactccagcaaaagtaaaaaaagagcaacttactaatatagatacaaatttaggtacgtattcaacaatatttaaaacttctcaaataaatagaagtataaacataaaattagcaacagataatataagtaatgtattacttatgccaggagaaactttctcatttaataaacatacagggaaaagaagtaaggaaaatggatataaaagtgcacctgtaataatggaaggtgagatggaagaagattatggtggaggagtttgtcaagtttcatctacgttatacaattctgtgttatacgcaggtttagaaattgttaatgtaaaaaatcatactataccatcaagttatgttccaaaaggaagagatgcaactgttgcagatagtggaatagatttcttatttaaaaataatctaaagcatccagtttacataaaaaattacgtttcaggaaatcaaattgtttgcaatatatatggaagtgcagaagataaacaaaatataacgatatcaacaaaattagatggcgtttcacaaactacaatgaaaagagttaatgaccctacaatgcctaaaggtaaagaaaaagtagacaaaagtggaagaaatgcatattctgtatcaacatatagaacatttaatgatgcaaatggtaaaaaaattaaaactgaaaaaatagctaattcatattatcctaagaaggaaggtattatattagttgggactatggaaccaaaaccagaggaaaaaccaaatacagacgaaaataagaataatcaaaatacaaacaatcaaaatccaaataatcaacaaaaaccagaaacaccaccaactgataataagcctaatgagacacaaccacaaccgcaagcttaaagttctcaagaataggatttatgtagagtaataaaaaatataaatctaaataggagggattactttgaatttaaataatataacgaattacgttcaaagtatttgcgagaatatttctaatgtattggatgtagatgttactttagttacaaaagatttaactaggatagcaggtacaggaatattcagaggtaaaataggagagacaatatcagagaagtcagtgtactctcttgttttaaaagatggaaaatcctatgttataaataaggaaatagaagagaactgtaataaatgtgcaaatagagaaaattgtaaagaattagctgatatatgtactcctgttaaaatgggagaacatatacttggaatcttgggtatagctgcgtttaatgaagagcaaaaagaaaagatactttcaaaagataaggagttaactgcttttgtaaggagtatgtctgatttaatatcttttaaactagatgaactttataaacaagaagttaagactatagatgaccttgagagggaagctatagaaaatgccataaagaaatatggaagtaatacagaaggtatgaaaaaagtagctgaggcattaaatataggtatagctacactctatagaaaagtaaaaaaattcaacattaaaagttaatagtattgaaaaagaggtaacctttttatgaaaagaagaggattaccttttttattatgagaatggtggaaaaatatgtatagttttgacttgacatattaaatatgttatcttaaatatatattttagagtggaggtgagtattattttagttaaagatataaaacaagacatagaaagcatgcctagaaaaattttagatatatctttgatagaagataataaaagtgatttgactttttttaatatagaagaagaagacggtgatgaaacattaaaagcattaaaacagagttatgtgactacaaattataaagaagaaactctattaaacttgcaaggagctttaaattcaaagtcagacacaacgtctaaggagttaaaattagaatcatataaaagatataacaatgcattggatttagcatataaaaattatataactagtgccattaatatggttaataaagctctggagataaatcctaaagatattgatatactaaatcttagaggtcttttaaagttattaaaatgtgattttgctaaatcatttgagagtttttatactgctttatgttatgagaataatcatatatctagaaaatatgtaaatctaatttcatctgaagattttaaaacttttttaggaagatacaatcattctataagatttataaatgaagaattaaattatgagtcaatacatattttagagaacataattgaagaagagcctgagctaatagagccatatgtaatcttatctttgttatatgataaactaggtaatgtaaaaaagagagaaggatatttagacaaacttaaagagctagataaagataatcctgtatttgaaaaaaatgaagaagaaaaagaagatacaagtaaaaaggaagaaataagaaaagtaaaaagaaagaaaagtattttaccatatattatagttggctgtgttttaataggtatggggatatatttgattcaaagcaaaaagagaatagaaaacttgaataaccaaataagtagtaaagaggaaaagttaagtgaaactgataaaaagttaggagaaacgagtaaaaaattagaaaaaacgaataaggaattaaatgaggttaaaaataaagaaccagaaagagagataactgtagctgatgaggaagatttatattatcaagctctaaatttaaagaaaaacaaagaatatgaaaaagccatagataattttaaaagtgtagtttcttctggtaaaactaaaaaatatatttctgagtcaatatatcaattagcaataacaaataaattattaggaaataaggatgaagctataaaatattacaaaaaatatataaatacttatactaaaaatgaccagtattatgatgattcatattacgagttgggtatgctttattatgataatggcgatttaaaaaatgcacaacagactttttatagtttgagaagtgaagttccagacagtatgtataacaattcaaaaataaaagaaatcttaagtgaaaaataggtttatatagttaagttttttgaaacaaccaagtatgtattttattaaattaaaataaaaataaatttaaaaagagattgtgtcaaattataactttctattttaaagaaagatatttgcttgttgataaaactacaaatatatgatttgaagcaatctctttaatttttggaggtggaaaatgaaagttttcaatcaattagtaataattttatctatctgggtaataggagagtatataagttcctttatacaaggaattatacttattcctgggagtatagttggtatgctattattatttctactactacaatttaaagttttagacttgagtagtatagaaaatgtaagtggatttttcctcgataatatggctatattttttattccagcaggtgtatcacttataaagtcattagacctaataagggaaaatgtattagtgcttttattagtcatatgtttaagtacactaatagtaatgtatactactggaattattgtggagaaaatgataaaaaagaaggaagaaggacaaaaaaatgtataatgtattacagacaccagtatttggtataatagtaacaatagtttttttcaatttaggaagatacattcaacgaaaaacaagtaatcctatatgtaaccctttattaattgcaatcgtaggaataatattgtttttaagcatatctaaaatcccttatgagaattacaagataggagctgatagtctaaatttctttttaggtcctgtcacagtagtacttgcagttccactttataaacaatttgaattatttaaaaagcatatgtttgagattattgtaggaataggttgtggtatagtgatttcttttgtatctgtattgataattggcaaaatagctaattcagatgtaagtataataaattcactaattccaaaatctataacaacaccaatgggaatatctttagcaaattctttaaatggtatagaatcaataacagttgtagccataatttttacaggtatttttggtggtatggttgcttctacagtattcaaactggggaatataaatcatccagttgctaaaggaattgctcttggaacatctgcacatgctttaggaactacaaaagcttttgaacttggagaaatagaaggagctatgagtggtgtttctattggagtttctggtacaattacagtaatactaattccaattataatgaattttatataaaaaataaaattaagacgagtaccttgaatacttaaaacaaaataaaataaaaaaaatttaaaataaaaactgaacgaaaaaaatgcaaataatgaaataaaaaaatcatgtactgaaattataaaaagaaaaatttcatttaggaattaattataaagagataattactaaacttgaatttgctaaaataaaataaattactgcgaaaatagatatttagaaaaaaatactataaatttactatattgcaagttaaataataagcagtatcatattatgctagaaaaagtttcatttaaggcataaatgagatgatttgaacgtttttaaagattagaatataaaagattgcactagacatatatgaaaaagataatataatagatgatgtaatagatgacagttcaagaaattataaaaaaaatttatttgaaatattatctattacatcaggaataatatatgtaagagtaagcttttaaaattctaaagatttagaaagattgaagggagaaagaaatgagtgaagttaagaataccctacaaaaacatccagttttaagatattcaacaatgctatttgggatgttgatgacatctataggaataaatgggttcttaagaccagcacatctgcttagtggaggtgctacaggtatagcaacatctataaactatttgacaaatataaatgtaggtttattaacatttttaatcaatattccaatatttatcttagggttcatataccttgaaaaagagttttgtatttcaagtttggtaaatatgattgtattttcattattattaggagcaactcaggaaataagtaatattatacctatacatgatatattgcttcaaagtgtatatggtggtatattatctggtttaggagtcggagttgtatttagaactaggtcttctcaaggtggtacagatataatagctgcaatactaaaaattaagaagaatatagaaatgaaagacactgctttagcaataaatggcttgatagtacttacaggaagttttttatttgggttggatttagcattatacactcttataggtctatttctaaatgcgtattcaatgagttttattaaagatgcaatgaattaccaaaaatctgttatggtaatgtcaaatgaagtcgatttaatagcagaagatataatgaagagtttagttagaggtgtaacttttttagatgcagaaggtgcatacactcatcaaaaaaagaagattatatatacaatagtttcatcaaatgagataccaaagataaaagatatagctttgaagtatgataaaaaggcctttatatctgtaaatgatgttacagaagtaaaaggaagagggtttaaagcaaaagatttatagaaaattttacaagctgggagtttataatgtaaatttgtatattatatctctcagcttatttaaatttagtatatgaaaataaaggttttatcaatgatttgtgtatcactttaaaagatatcattttaaaattaaaattgaaaaaattactcaatatgtagaaaacataaccactattaggatataataaatttaatagatttagtaaaatatctaggaataacgttggaggaatagcattatgaatttatctaaagaatatgttaatttgtatgataattatttgaaatatataaatgaagtaaacaaagagattagaagtataaagaacatgaagaaacgtgttttaaaaaagggcgattttgctccagaaaatgaagtattagaattggaaggaaaaacaatacgcgatatagatgatgtcgatacaaaaaaaccaaaaaataaaatatataaattttcaaatggggatgtgtatgtaggaaaatttttagaaggaaagatggaagggcaaggatcatatactttttttgttgatgaaggaacggctatggagtacataggagagtttaaagaagacaaaaaaaacggaaaaggaaactttgtattttcaaatggaaatgaatatataggccattttgaggaagatatgatgaacggtattggaaatatgttatataatagcaaagatgaatatattggaacttggaaaaatggaaaaaaagatggaaaaggtatttataagtggagtgatggatgtatatatgcaggtgaatttaaaggtggaaagatggaagggtatggtatttgctataatagtaaaggggaagtactttatgaaggagaatggaagaataatttgattcatggtaaaggaacttatatatgggaaaaaggtaaaaagtatataggtgaatttatgcatggtaaaaaacatggacaaggaactttttatctaaataatgaattggtttatgaagggacttggaaatttgataagccatccatcttcgacagaacattagatgaaatattttcattaagactatagctttatctattaatagataaagcttttttctaatacttactgtaaataagtatgaatgatattgattagtatacactatcaatattaactcaataaatgtgatattaaaaatttttgattgattttaagaaggagggatatattgaagagattaattgctttagtgttagtaatacttattgttttattttatagccctgaattgatagaagaaggatatgatttaaaagaaaaattttttcaaagtgaaatatggaatgaatttttagacaaaataaatataaataataattctaagaaagataaaaaagaacaaaatcaaaatttacaatcaaataatactgaaggggagaacttaggagagtcagatataaagaattttgaaaaaataagcttaggagataatttaagctatgttttatcaagtattggtaaacctggtagaattgatattagtgaatatggttttgattggtatgtatataatcaatatggaaaagaatttgcaatggtcggacttgaaaatgatgaagtagtagcactttatagtaattctattaattcatgtgaaaatcaagatataaaactaaatcaagatagacaaacagtgagaactaagattacaccattaaaatataagagaaaaggaaataccagatatataataaactcagaaaatcaatatgatataataagtaaagaaggtaagtatattacaattttctacgatattcatgaagaaaatagagtttgctcatatttaataattgataaaagtactgaagatgagtttaaaaaattatatccagatgatagagaagaacttaaaaaatgttttgaacttgaagttatagaccttgtaaatagtgttagaaatcaaagaggattaaactcattgagatacagtgaacaggcaactttgagttcaagaaaacatagtgaagatatgagagataataatttttttgaccatataaataagaagaatgaaactccatttgacagaatgaaaagagaaggtatagtatatacttcagctggagaaaacatagcagcaggacagattaatgcaatatatgcgcatgaagcttggatgaactctgaaggacatagaaaaaatattttggggaactataataatattggagttggagtaatatttggaggaagctataaaacatattacactcaaaatttttataaataactaaaatatttgaaaggaagttaaaaaatgacatcatggaaaaaaaagacagtatataagtgcttaatagcagtagtcttgttttgtggaatagtgttaatatctaattttagtaaagtttctgctttgatgatggatactaatggaaatgttttgattaaacatggttcaagggaaaaaaagctaatagcaattacctttgatgatggtcctcatcctaaagaaactagtcaagttttagatgtattaaagaaatacaatgtaaaagctactttttttatagctggaaaacatgcaaaatggtataaagaaccattagtaagagcaagtaaagaaggtcacgagataggaaatcatactttcaatcatcctgatataagtaatttaagttctagtcagatagaagaggagattgttaagtgtgaagacattttgaaagaagtaactggaaaaaaacctacattatttagaccaccatttggaagttatagagaaaaagacttaatagaaattgcaaaaaagcatgactataaagttgttttatggacaggtgtagatgtgaaagattggaaaaatccaggagctaatagcattgcagataaaataattaataaagtaaaaaatggagatataatacttttgcatgattatgcaactaatgatacagttgaagctttagatatgtttattccaaaaatgattgaaaaaggttttaaatttgtaacagtttctgagttgataaaataatttttaggggggagatttacagtatgattcttatgatagacaattatgattcttttgtatacaacctagtccaatatatagaagaattaggggaagcagttgtagtaaaaagaaataatgaaatcaaaataagtgacattgaagaactaaatccagaggtaattgtgttatctccaggaccgtgttctccaaaagaagctggtatttgcatagatattgttgagcattttaaggggaaaaaacctatactaggaatttgtttaggtcaccaaactattggatatgtttttggaggagatattataaaagcacaacagcctgtgcatggaaaagtatatagtatcaaccatactaataaaggagtttttaggggacttaaaaatcctttaaatgtcactaggtatcattcactaataattgattccaatacagttccaaaagaattagaaattacagcaattactgataaaggggaaataatggggattaggcataagaaatatttaatagaaggagtacagtttcatccagaagctattttgtcagagtatggtcatgaaatgcttgaaaattttataacagaagctagagaaagggtacatatgtaatatgataagagagataaatactaaattaaattcttttgagatatttactatttttagaaatgaacatgacagttttatattagacagtgctatggataaagaaaaattgggaagatattcttttataagtagccaaccatttaaggtattaaagtataaggatactgatgaaaatcctttagaagttttaaaagaagaactacataagtatagggttgtaaatgatactaatcttccatttgtaggaggtgctgtgggatatttatcttatgatttaggtaattacatagaaaatttacctagaactgctgtagatgatattgagatgcctgatatgtattttggattttataatcatgtaatagttatagaccatcttgtgcaaaaaacttatatagctactccaaacatagatatcgaattagaagaaaagataatagatgatatagaacaaagaatattaaaagaagagaaaaaaggtatagatagcatatgttatgaagaaaaagaagtaacacctataagacttaaatctaattttacaaaggaagaatttaaaaatgcagttcaaagtgttagagagtacataagacaaggagatatatatcaagctaatttaacacaaaggttcagtggagaaacagaacttacaagctttgaattgtatagggacttaagaagatttagcccagcaccatttggggcattcttaaactttgaagatacacatatattatcaaattctccagaaagatttataagatgtgttaataagagaatagaaactagaccaataaaaggtactcgtccaagagggaaagataaagaagaagatttaagacttcaacaagaacttagaaatagtgaaaaagatagagctgaactacttatgatagtagatttagaaagaaatgatattggcagaatatctaaaactggaagtgttaaagttccagagctatttgtaattgaaccatatgcaaatgtaaatcacttagtttccacagttgtaggtgagttaaaagatgataaagatgctactgatgtaataaaagcaacttttccaggggggtctataacaggagcacctaagattagagcaatggaaattatagacgaattagagccaacgcaaagaaatgtatatactggttcaataggttatataggttttaatggtgatatggattttaatatagcaattagaacaataatcaaaaatgacaaaaaagtctattttcaagttggaggaggaatgacttgggattctgacccagatgaagaatatcaagaaacacttgataaagctaaatccataatgaaggctttgaggggatattatgaagaataatgtaggttttgatagtagtttaagtaaatttggaattggtttgtttgaaactattagagttaaaaatggaatagcagtagatttagatatccatatagaaagaatgctaagttcaataaattgtttggatttagatataaactataaaaaagatttcttgataaatgaaattgttacatatataaaaaaagaaaatgtcattaataaagcacttagaattactgtttttgatgaaggttataatatatctattagggatattccatataatcaagagacgtatgagaaggggtttaaattagctatatcgccaatagttagggggaatagtttaattcatagacataagactactaattattttgaaaacatatataccaaaaatatcgcaaataagactggttataatgatggtatatttttaaattcagaaggtgtaatattagaatgttctatgagcaatattttctttataaaaggagaaagagtgtacactcctagtgatagattaccgatattaaatggaataataaaaaaaaggattatagagatttgtgacgaattacatatagagttgatagaaaatgaaattaatatatcagaaattagtagttttgattttgtttttgtcacaaatagtcttatgggcgctataaaggttacagaaattgacaaaataaaatttaataaagaaaatgttgtttttgataaaatagtgaagttattagaataaattaaaatattaacaatttgttggagacaaaagatgataggttgtatttatgaagtatacaatgaagagatgactaaaataatagaaaaccaaaacactttggctgtatatttagtaggttctagtaaagacgtagattttactctttatgatgtagagataaacgatattgatgtgttcgtttttgtaaaagaaggggaaaaacaagagagaatactgtttaaaaaaaagggaatagaatttgatgtaaattacttttcaaaagatggtgtaaaaaaattattatcaaatagggaatatttctttgtgaaagaaatgaaagatgctaaagtactgtttgatagggagaatatatcaaatattataaaagatataagtagagatatttacttagaaggacccagtaaaatgtcattagaggaaaagtcttttataaagcaagatattggagcaaaaatatcgaatttaaaaaataaagaaaaatttgatgtttttgaatatcattttttgacgaatttatatttaaaagatataataattgggtactttaatataaatgataaatgggtaccaaaagacaaaaaattgctaaaagttttaaaaaaagaaaataatgagctttttgaactagcgtcaaaagtaagtgaaaattatgactatcaaagacttttagatgtttataattatatttttaaagaaattgagacaaaagaggttataaaactaatcttctagtcacaaatcaatggggggagtttaaatgaataaagttgataaagaaaagatacaacatgcagtaagagaaatactagaggcaattggagaagacccagatagagaaggtctaatcgagactccaaatagagttgctaggatgtatgaagagatattctctggtcttagtgaagaaccaagagaccatttaaaagttctttttgcagatgaaaaacatgaagaattagtattggtaaaagatattccattttattcatgttgtgagcatcatctagttcctttctttggaaaagctcatattgcttatttaccaaaaggaggaagacttacagggctttctaaacttgctagagtaatagatacattggcaaaaagaccacaattacaagaaagaatcactaaaaatgctgcagatataataatggaagaattacaaccttatggtgtcttagtagtagtagaagctgaacatatgtgtatgacaatgagaggtgtaaaaaaaccaggttcaaaaactgttacatcagcagtgagaggaatatttgaaaaggacattgcgtctagagccgaggctatgagtttgattactatgaagtagcaatttattatagatataatcatttattgagatataaaatttaatttaagggagtgtcattaattgtgtttgattatggtaaaagaacttatataatgggaatattaaatgtaactccagatagtttttctgatggaggagattttaataacttggacatagcaatacaacatgcaaaagatatggttgaccaaggtgcagatataatagacttaggaggagagtctacacgcccaggtcatagctatgtagactcagacgaagagctaagaagagtaatccctgtaataaaaaaacttaaacaggaattggagataccaatatcaatagacacttataaggcagatgttgcagaagaagcattaaaattaggtgtcactatggtaaatgatgtttggggtcttagaaaagataaaaatatggcttctgtaataggaaaatatgatgcagaagtgtgtataatgcataatcaagatgggacaaactatgacaaagatataatggagtcaataaaagacttttttaaggtaagtatagaaatggcaatgagttgtggtgtaaaaaaagaaaaaatagtacttgacccaggcgtaggatttggcaaggattttgaacaaaatattgaagtattgagaagattaaatgaattaaaagatttagggtatcctattttgcttgggacatccagaaaatcagtaataggaaaagtacttccagttgagcctaaaaaaagattagaaggtacaatagctactactgttcttggtataagagatggcgtagatatagttagagtacatgatgtttatgaaaatttaatggcagctagaatgactgatgcaatatatagaaagtaggtataatataatggataaaatattacttagtaatctaggattctatggatatcatggtgttcttaaagaagaaaattttctaggtcagaaattctttgtcgacatggaactttatattgattcaagagaagcaggtcttagtgacgatataaataaatctgtaagctatgccgaggtttacaatgttgttaaagatattactgaaaataaacaatttaatcttttggaggctttagcggaaaatattgctgaagaagtcttgaataaatttatacttataaatggagttatggtcagagttagaaagcctgaggctcctgtaaatggtatttatgactattttggtgttgagataaggagaacaagagatgaataaggcttatttgggaataggtactaacatgggtgatagatttgataatttatcaagagcatgtgaacttttgaaaaatagtgattctatatataaagtaaaggaatcaagtttatatgaaacaaaaccatggggatatacagaacaagcagattttctaaatatgtgtgtagaaatagaaacagaatttgaaccttatgagttgttagaatattgtcaagaaatagagagagaactacacagagagagaatagttcattggggaccaagaactatagatgtagacatactattttttaatgatgtagcttccactgatgaaagactaacaatacctcatccgaggattcaagatagagctttcgttttgataccacttatggatttaaatgaagaacttataataaatgaaaaaacagtaaaagaacatttaaacctcctatctgctgaagaaagagaagaagtaaaggagcttgtaggttatgaaagaaaacctatttaataataattcaaagatagagataaatacaaataacaaaaagataactgtaaaaaaagataaacttataatagctggaccatgtgcaatagagagttatgagcaacttttggagactgctaaatttgtaaaaagtcagggagcaaatattttaagaggaggagcgtacaagccaagaacatcgccaaattcatttcaaggattaaaaaaagaaggtcttaaaatattaaaagcagttaaagacgaagttggtatggctgttattacagaacttatggatgtaagagatatcgacgaactgtatagtataagtgatataattcaaattggttcaagaaatatgcaaaactttactcttttaagtgaagtgggaaaacaaaataaacctgttatgttaaaaagaggaatagcatccacaattactgaatggataggtgcttctgaatatatagcaatagaaggaaatagtaacattataatgtgtgagagaggtataagaacgtacaatgattatactagaaatacattagatttagctgcggtacccattattcaaaaggaaacaggtcttcctgttgtggtagacccaagtcatgccactggagttagatatttggtaaaacctatgtcactggcatcttttgcatgtggagcagatggaataatggtagaagtacatcctgacccagaaaatgctttgtcagatggtgctcaatctctttgttttaatgaatttgaagatttaatgaaatcaattaataattattaaaagaggcaagagcctcttttttattcgtaatcattgctaaggtaaatttataagttataatttgatagttagattatttaatataaataaagatttaatattgatagaattaatataaaaaataaaaattttttgattaataagaaggatatcaataaaaaaagtcgaattgtgtatattgagtgattgacaaatttagaatatagtgtagaatagaaatgttaacacaaaaaattacaccagaaggtgataatatgaatgatataaaagacattattgaagaaataaaagctagatgcgatatagcaagtataatatctgaatatatgaatataaaacaatctggagctaattacaaagggttatgtccatttcatggtgaaaagacaccttctttttatataaatacatcaaaacagatttataagtgttttggttgtggtgaaggtggagacgtaataaattttgtcatgaaaatggaaaatttggattttatggatgctgtaaaaattttagcaaataaatgcggtatagaaattaacactaacatgaatgaagaaactaggattaaaatagaaaaatctaagaaatttcaagatatccatacggaagcagctagattttatctttcaaacttattgggaagcaaaaatcttgggtatgaatatttaagaataagaggactagatgataaaattattaagaaatttggtttaggattttctttggattcatggaattcacttatgaatactctaataagtaaaggatacaaaaaacaagacttattggattgcggtctaattgcaaaaaatagagatggaactaattgctatgataaatttagaaatagagttatgtttcctatatttgactatagaggaaacataataggatttgggggaagagtattagatgattctttgccaaaatacttaaattctccagacacattaatttttaataaaaaacagaacttatacggattaaattttgctagaaaaaatttagaaagtaaaactatagtcttagttgaaggatatatggatttaatttcgctttatcagtatggtataaaaaatgtagtagcaacccttggaacagccttgactgaacaacaaggcattttaataaagagatatgcggacactgctattatatcttatgattctgatgaagcaggaataaaagcgactttaagagctatagatatacttactaaattaggtatcaatgtaaaagtgttagacttaaaagatgctaaagacccagatgaatttgtaagaaaatacggacttagtgattataaaaaagctatggatgtttctactcactacataaaatataaaatagatcatcttaaaaaagaatttaacattcaaaaagatgaagaacgagtgaagttcgcaaaagaagcttctaaaattataaaacaattgacaagtcctgttgaaattgatttttatacaaagtatttaagcaatcaaatagatattaatgtcgagtctataaagagagaagtttatggcaaaaattacaataagccatataataacaaaaatcaaaagaaaatagaagaaaaagtaattgaaaaagtcgaagtcagacaagacggaaaacaattagttgaagaaactctaataaaaataatgttagaagacaaaaaaattagagaaatagcgttacttaaagtagaagaaagtgattttttattgaaagaaagtaaagaaattttaaattacatgattaaaaatcaagaattggacaaaataactattgacaaattgaaaagtttaaacatatccgaagaatacttaaaagaattaaattcaatttctttgaatagtataaacttagagaacacaaaagaaatagaaggaataataacaaatatcagaaaaaactcattagaagagcaaattaatagcttgttgagagaacaacaagaattagaaaataataatgatatgaaagaggtagatggtagagttatggaaattgctttaaaaatagttgagataaataaaattttaaagagcttgtagagaaaggaggtttgagtgtggaaaataaatcgaataaaaaagagttaaaaaaggttactgctaagacattaatagaaaaaggaaaaaagcaaggttctctgacacttgcagagataatggaagctttttcggagactgaacttgataaggatcaagtagaaaatctttatgagactttaggaaatttgggaatagaaataacagaaacaaaaaattataaagctgatatagatttttcggttgctgatgacgatttaagtataggccacttagatgaagatgcagaggcaatttcacatgatgactcttctgcaatagaaatagaaactgtggatttatctttaccaaaagggataagtatagatgaccctgtaagaatgtacttaaaagaaataggaaaaattcctctacttaaaccacatgaagaagtagaatttgctagaaggatgcacgaaggtgatgagatagcaaaacaaaggttagttgaagcaaacttaagactagttgtaagtatagcaaaaagatatgtaggaagaggtatgcttttcttggatttaatacaagagggaaatttaggtcttataaaagcagtcgaaaaatttgactatacaaaaggatataagtttagtacttatgcaacatggtggataagacaagctataacacgtgctattgcagaccaagctagaactataagaataccagttcatatggtagagactataaataagctaataagagtatcaagacaactacttcaagaacttggaagagatccaaaaccagaagaaattgcaaaagaaatggaaatgacagaagataaagtaagagaaataatgaaaatagctcaagaccctgtgtctttagaaacaccaataggagaagaagaagatagccatttaggtgattttattccagatgatgatgctccagccccagcagaggcagcagcatattctttattaaaagaacaaatagaagatgtacttggttcgttaaatgatagagaacaaaaagtattaaagcttagatttggtcttgaggatggtagagccagaactcttgaggaagttggaaaagagtttgatgtaactagagagagaataagacagatagaagcaaaagcactaagaaaactaagacatccaagtagatcaaaaaaacttagagattatttagactaaaaagatacatcattgatgtttttgtgataaatgccatgagataagtgatatctcatggctattttgtagtaaagatttaattttatttttgtagttatttcagtctaatatctataacttggattaaatcctataaataaagggaattgaaaggagaattatatttgaaattaacagatagattattgaaaatagcatcattagtgtcagatggtaaaaaaatagctgatatagggacggaccacggatacataccagtatatttgttaaaagagggaaaagtaccatttgcagtgctagcagatgttaataaaggacctcttgacaatgcacataaagaagtcatacagaacaatcttttagataaagttgatttacgattgggttctggtatagagatacttgaaataggggaagtagaagaagtgataattgctggtatgggtggaatcttgataagtgagcttctcgaggctaaaaaagaagtagcacataatgtagaaaaattaatattacagccaatgcaagcacaagaagaacttagatattaccttttaaacaacggatatgaaattttagaagaagttttagtgagagaagattttagaatatatgagataattgttgccaaatatacaggtaaaaatactataatagaagatgagatatattatgaggttggaataaagcttttagaaaacaaagattctctttttaatgattttatagaaaaaaagataaagacatatagttctatagttaataaattagaagggaaaaatggggaagctatagataagaagagaaaggaaagcgaagttgcaataaaaaaacttgaaaatttaataaaataaataggaggtatatatgctattaaagagtctaactagaaaaattgaaaaaaagtatcctctaaacttagcagaggattgggataatgtaggtcttatagttggagattttgatatggatgtaaaaaaggtattggtatctttagaagctaatgaagatgttattgatgaagctatatccaaaaatatagatttaattgtgacacatcatccttttatatttgggaaaattaataaaattaatagtggagatttaaaaggcagacttatccaaaaacttattaaaaatgatatatcactttattctatgcatacgaattttgatatagcatttgatggtctaaatgactattttatggaaattatggaatttggtaattcaaaggttttagatataactaaaagcgaaaatttgtataaattagcagtatacgttccacataactattcagatgaacttagaaaggttttaagtaattcaggagcaggtcatatagggaattatagtgattgtacgttttcaatagaaggtgaaggacaatttaagccattagaaggctctaatccgtttcttggaagtgtaaatgatatagaaactgtaaatgaagttaaaattgaaactgtagtaccacagaagcttttaggtggggtaataagttctatgttagatgcacatccttatgaagaagttgcatatgatttgtacaagttagaaaataaaggtgagatatttggactaggtagaataagtaaacttgataaaagtatgacattagaaagtctttcaaggaaaataaaagagaaattaaatatgaaacacataagagtagttggaaaccttagtacagacataacgaaagtagccgttgtaacaggagctggttcagaatttgtaaaaaaagctaagagacaaggtgcagaagtactaattacgggtgatgtaaagtatcatgaggcacaagatgcacttgatattggaatgtgtatagtggattgtggtcattttgatacagaagatatattcaaaaatgttatgaagagatttttagatgaatttagtgaaattgaagtaataaagagtaatgtatatttgaatccatttagtactatttagaagtgtttgattaaaaaatactatataaaaaataaatttgagtttaattagggggataatgatgaaagtagcagtaatttttcatagtgtttgtgggagtacatatttattagctagagaatataaagaagtgcttgaagaaatgaatatcgaggtagatatatttagagtaagtgacgaagttgcaaaaacacttcctcaatattatttgataaattacaaagaatacaaagacgaatttgaaagtataaatgtaattaaatctggaaaagaaatattagattatgatgctatatttatgggttcaccaacatattatggaaatgtatctggaccaatgaagatgtttatggatagtttttctgatatttgggtaggtgctcctttgagtggtaaaatatttggttgttttgctacagcaggttcacaacatggaggaggagaattagctttgcaagctatgaatatatttgctcaacatatgggaatgactcttttgtcagttccatgttcagtaagaggaggttatccagcgtatggaatacttcatatagcaggagataattctgatataagaccaaatgatgatgccaagataggtataagagattacctaaaaagacttaacatataagaatatcatataaaaatacctaaaagtagctgtatatacttttaggtatttttacttaattatatacgtgaagctttaccagaaatatggtcaatttctattttaacaacagttgttaagttcatatccttctctatgtacttcatgccttcttcaaagaatcctttagaatatttttttattatttctacaagagcatttttcttttcttcattttctacagtgcaagcttttccaaaaactatagcactagaataagtagtactaaatttatctggaataacactttcattagcaactactaaaaaagaaactttgttgtttttcgatatattatctaacttatgtccatttcttgcacaatgaaagtaaatagaatcattaaagtatacataatttacagcaactccataaggataaccattttcagatatagtggaaaaagtaccaaattcaccattttttaatacttcaacagtatcttcttttgtcatttctctttttttcaatctcatttctttaaacataatatcatcctttctaattttgatgcttaaattaaattttagcacatttataaagattatgctatgttttttacaaattttaagaaaaaaatatagtttaagataaaaggtagtgaaagagaagctatttggaggtttatttatgatattattgttagagtagtacaaacaatactaataaatttaatagctggtttcttgttatttaaggtagtaagcatgtctataagaaggggaagttatcgagggtagaagttgttatttataacgatattataaagaaaatattattatataaaataataaatagtaaagaggtatcaagttgaatataatacttaatacctcttcaaaattaaattataaaagtgttgtgggaattgtcctatacatggtaaggagataataaagaatgtatctttaaagtctcaactaaacagcaaaatttatccaacaaacatacaataaatgcttctttgtatctaggtggcttaacagtaagtggccacatgtgttttaaaattatgtccgtttctttttcatttatttgaaaaaataaagttgcattttttaatgcttctctagggtgagtaaatccatgtaatccttttctatcacctttgtaatgccaatcataaagaaaaaagtcgtgtagtaaagctcctctaataacactttgaatatcaacacgtaagtgcaattttttacataatagataactataatatgctactgacaaactatgttcaagacatgaaacattgccatgatgaggaaatgttctcataagttgaactttttcagaagaaagtatctcagaagcacattcattaaaatatttgatttcagcttttgacaacattatgaaaatctccattcttagtaatatataaatactatacttcaacgataatatgaaatatttcttatcctacaaaatataatacccaataatacaagtaagataccttttatggtattttaaagtaagagagattttattaggctaaacaatgaaaaaattaaaagtaaagctatagcaatatatagtatttttccaagaggattgccaaaatttatagtccatccaataccaaaccttttattaaccattaatgatgggtcatttggattattatacatgatgcctgctatccaatacttctcatcttcttctggagaataagatgagttgaattttaaatttggggaattaatatatgttgctattaaataaattataactaaaagcgttgtaatattcatagcagttgatagttttgtttttattgataaaagagtagtaaaaaactgtgttgtcattataatcatcaatattaaaaacaaataaccaattttatttaaatatttaatgttttcaactctactttcttcaattctatttgtatctatcttaatccttgactttatggatccaatggaagttatatataataaaaccattaaacaaaagtcagtaccgattaatttaaatacattaagaaatgatttatctataaaaacatcaggagacccatttatgttccaatgagtggcaattgagtctggcaatttattataattaaatgctataaaaatactcatccccaaagtaaatagtatcggtattaaatagattattttaaatttttttattattttatttttcttatttataaaatccatatctactattaattttgaatctacatctatatgacctaatttagaataaatttctgatttaagcttcttagcttttttatgtgtatgaatatatagtatactctcatataataaaaaacctataataccaataaaatatgaaagttccaatttattaaatgtaaaaaccagaataaaaactaatataaagtctataataaaacctaaagataatagttttttaaattctttatctaattttataaagtaattataatttttatgctcttggtctatagaaactccatagatgtgttttttacctacaaaatagggcataaaataaaatgtagcatacatcaaaattagaactggaaatattgtaaatagacattcaatcttactcataatatttcacctcatacttgtcaaataaacttgaacttagtgacaaaaattcttctttactaatacctgataaataagattttgccaccaataattccaagtcaagtttatttttttgacgagttgtattatctattttcattggtagttgagctacaatagcaccttttcttctatcaatatttaagaatccctcttcttttaactcattgtaggatttgttcactgtatgtaaatttacaccaatattttctgccatacttcttacagatggaagtgattcatttattttcaattctcctgaagctatagccttagttatttcttctttaatttgtacataaatagatttatcactattaaaatctaaatttaaaaccataaaaaacctccattatgctttataaatgaaaacgattgttatatacatagtataacataaaaaataataacaaacacaaaatataagtttatattttgtaaaaattgtaatttaaaaaataacataatttttattaaaataatacagatactatttatagatagaaataaaaattagaaaggagaaaaaatatgttaacatatttaatgaaaagacaaatgcataaaaaagatgatggaatgagtaaaccaatgatgattacaggagctgtaattacaggtgtaggagcatatgctgtatacaaaatggtaaaaagccataaatctaattctcaaatggtcaatacaaattattatggaaatagcgattatgatgattataaatatgacgaatttgattatgactgtgattgtagagacacaaaacaagattatgaatatgaagaattaaaaaaaaaagtaaaagaatttaattcaagaagaataaattgtgaaaattgtccacatgtttctcaagaagaaatgatgcaatatgtaaatagtgttaaagatgtaaaggaagatattgatttacatgaagatgctaaaaaagataatatttacaaagaagatgaatacaaaaaatatgaagaagaataagtaatattttgtataactgaacaaatagtaatgtcaaattatttaatatctagttttaatatgtaagttgtaacttaacttgaaagaatcagtatcattctttagatagttaagttacaacttacattttgtttttataaattttaatagttctttgtgactattttgtaattttagaaatattttagtatccagggtaattgtgtataataaaacttgtatagatagatagtatgaaattaagcagatagtttaaaattaaaatgaaaagaaaggaaatagttatgttaaagttgttgatagttgaagatgatagtactatatcttttggaataaagtatgctttagaacaagaaggatttagtatagatatatcaaaggatttatctagtggaaaagaaatgatttcttctaatgaatatagcatgatactgttggatgttacattgccagatggaactggttatgagctttgtaaatatataagaggattctctcaggttcctataatattcttgactgcttgtgatgaagaagtaaatattgtaatgggtctcgatataggtggagatgattatataacaaaaccttttagaattagagaattaatatccagaataaaagctgttttaagaagaaaaggtaatacttcagaagaaaataagaaaatacttaaatttggagatttaagtatatatacattagaagctagagtatataaaaatgataaagaaatatttctgacatcagttgaatataaacttcttttaattcttatacagaataaaaatactgttttaagtagaactcaaatattggaaaaactttgggatgtaacttatgattttgtaaacgacaatactctaactgtttatataaaaaggcttagagaaaaaataggtgatgatttatgtgaaccaatctacatagaaactgtaagggggattggttataaatggataggaagtgaaaatagtgtttctatataatccagaagtgaagaagtttttaagtaagtatgttactttgatgtttattgttatcataatatctattggatttagcataatcaacgtgtctttaactaaagagatggttgtaagaaataatcaagctataatagggactttatcgagtaagtatccaaacttagaaagtcagatagtagacataataactcaagggaagtctatgaagaacatagattatggtcagaaaatattaagtaagtataattatgataaatctattaagataaactctgagcctattatttctaaattagttttagagactatcaaaataaatataatattagtatgtataatatttattttgatatttgtgttggttgttagatattttacgtcaatttacaatgatttatcagatatgactaagtatgtttactatagttcagagggtaagccatttgatatgaaaaacaagaatcaagaagggcagataggtcttctaaaaactgaactcttaaagatgacgacaattcttaatgaaaaggttgaacttttaaaaagagaaaagatatttttaaacaatacaatttccgatatatcacatcaattaaaaactcctatgacttctttaataatgttgaatgatttattatataatgatgtaccatacgaagtaaaaatcgattttttaaataagataaaaaatcaattaaatagaatggattggttgattaaaagcatgcttaaattatcaaaggtagaagcaaaagtgataaattttaaaaaagataaggtaaaatttagtgaactcatacatagagcaatgctatctatgaaaatacctatggagattaaaaatcaaaaactgactatagagggaaatgataatgtatcttatattggtgatattgattggtctgtggaagcactagtgaatataatcaaaaattgtgtagaacatactcctgaatttggaaatataattataacctataaagaaaatccattattttctgaactaataataaaagatgagggtgaaggtatagataaaaaagatataccacatgtatttaaacgattctatagaggaagaagtagttcaaaagaagatagtgtaggaataggtcttgcaatgtcaaaatctataatagaaagccaaaatggcgatatatatgtaaacagcgaaaaaggtaagggtacagaatttcatataatatttcataaaatgtatgatagtgactaatctgtaatatttaattcactttatagtaatagccaaaacctaatatatgaagtatagaatataaatattggaggtagttatggaaattttaagagtagaaaatctaactaaaagttatggtaaaaatgaaacaaaagttgatgctataaaaaatgtaagtttatcagttgaaaaaggaacgtttatagcaataacaggtccaagtggaagtggtaaaagtaccttattacatttattaggaggagttgacagaccaactagtggtaaggtttatataaatgatgttgatatatataatttaaaaactaaggatttggcgatatttagaagaagaaatataggtcttatatatcaattttacaacttaattccagtcttaaatgtgaaggaaaacatattgcttccagcagagcttgacaatagagatattgatagagaatattttgatgatttaatgaaaacattaggtctaattgatagagaaaagcaccttccaaaccaattatcaggaggtcaacaacagagaacctctataggacgtgcattaattaatagaccttctataatattagcagatgagccaacaggtaatttagatagtaaaaattcaaaggaaatattagaattgttaaaattgtcagtaaaaaaatacaatcagacactaataatgataactcatgacaaaaatatggcacttcaagctgatagaattataagcatagaagatggaatcataaaaagtgatgaggtgatgtagatgaatttatatacatcactaaccattagatacttaaaacaaaataaaagaagaaccattgtaaccataatcggtataatactttcaacagctttaatttgtggtataggaaatatatttgaaagttttatggattatcaaatgagagaaactataaagaatgatggaagtttccatgttacattttatgatgtaaatagaaaaaatgtggaatatgtaacgaaatcagctgaaatagaaaaacatgcatttaccaaacaacttggatattctaaattagaaaatagtgaaaatgctatattaagtataaagcaatatgatcaaaatgcaataaacggatataaagtttctataaaagaaggtagatttccagctaaggaaggagaaattgttttaagtgaaagtattattaatcttatagatgataagttaaaaataggagataagataactttaaaagtaggggatatgtttgactcaagcaagaaaaagattgatagtatgacatttcatgaaggtgattatatagcaaatgaaaaagatagaacttttaaagttgttggtataattaaaaaacctgggtttgaacgttataatggaattgcaacagctatagcctactttaatcctatgaataattacaatgatacaattaatgtatcagtagcagtaagaaatcctaaagatgtgtataagataagtaataaaataagtaaaaatatatattcaaataaagataaagaagcagtttctgatatgataaaatacaatgaacatttattgaggttacaaggtgctagtaagtattcaaatataaatagctctataaagtctataattatagcagtaactattttagtaatcatatgtacaattgctacagtgtacaattcctttagtatttctataaatgaacgaaaaaaacagtttgggatattaaattctataggtgctacatctagtcaaattaaaagattagtttttatagaaggtattataattagtttaattggtataccaataggactaatatctggaacagtagctatagacctattgtttaaaattataaataagtattttactgaatcggttgttactaagatgagtttgcagatagtgtataatccaataataattattgttagtataataatagttttgcttacaatctttatatcaattctactacctgcaatatcggcttctaatatttctccccttaatgtgattaaaaatactggagagtataaagtgggcaaaatcaaaagctcaagacttattaaaatgatttttaaaactgaaggagtacttgcatataaaaatattaggagaaatagaaaaaaatttataataactcttttttctttaatggtaagtataataatatttatatcttttagtggctttacattacttttactaagaggtgaagaaattagaaattctcaaagaaaatatgatttgtatttaactgcaaagaacacagctaggtctgtagaggatactataagtgaactagaagatattgatgggataaaaaactttgaattggcaacaggacaatatgtgtctataagagtaagtgaaaataaaataaataaatccaaggaagatttaatcaggaaatattatcaaaaatataagattggagaaagttatgaatatgatttcagtaataatgaattgatttttccgggagattttgcagtaaaaaacaaaataaataacttagtacagggctcttttaataaagagagagcaattgaagaaaatggtgttatattagttagaaaaagtgcaattgaagaaaatgggaagaaaggtgtagtagaacttaccaactataaagtaggagatacagtaaattgtgaatatcttgatgaaaatgccttaagtaaaaaagtaaaggtcaagattcttgctataactgatgaagaacgtctaggttttggttatcaaaatatggggttacaatttataacttatgatgaagttgctaaaaatttaaatttaaaattaagtaaaagccttatatttattgattcaggaggaagcattaagactaagaaggaaatagaagctttggcaaataaaaatgattttaacttttatgatgaaatttcaagcagtgaaagtgaaaaacaagatttaaaggttattaaaatatttgtatatggttttatagtagtgatatctttagtgagtgttacaaatattctaaatacagtaagtacaagtataaatctaagaaaaagagaacttgcagtaatacaatctataggggttactcctaaaggatttaggaaaatgatatatttagaaagttttatatatggtatactgtcattgttgtttggaataccaattagtattggtataattctaattatgaataaacttatttcaggtgtaattgaattttctccgattataccgtggacagccatagttatctgtatagtaagtgtttttataataacttttatagcagggtatataccaatgagtaaattaaataaagaaaatataatagataatataagaagagaaagtatatagatataaaaataattcttaactatataaaatattattaaaatcatttaagtggtataaaatattattatatcacttaaatgattttttatttatataagaaatctaataataaattactagaggtatttaactatttagaaagaattggtattatataaagtaagagaatatataataagaaagaatatttgattttatttgaaaacaaaagaaaaagaaggtgattactatttctcatataactgcgaagaatatgtataaaagtttagaggaaagaataaacaagtttccacaaggtgctccaccatctgatacattatacaaaatactaaatgtactatatacagaacaagaggcgaagttagttgctcagcttccaataaagcctttcagagtaaaaacagcagctaaaatttggagtgtaagtgaaagtgaagcatatagagtattggataaacttgctagtaaggctctgatactagatatagaagataataaagggaagaaatatataatgcctcctccaatggctggtttttttgagtttgccatgatgagaacgagacacgatatagaccaaaaacttttggcagaactttactatcaatatatgaatgtagaagaagattttatcaaagatttattttattcaacagaaacgaagcttggaagagtatacgttcaagaggaagttttaactaatgataatgaggttagtattttagattatgaaagggctactcatataattgatgaatcaactcatataggtataagtatgtgttactgtagacatagaatgcaacatgttggaaaagcttgtgatgctcccatggatatatgtatgacgtttgacaatgtagcaaattctttaataaataataaatttgcaagacgtgtggataaaatagaatgtaaagaactacttcatcaagcatatgaacataacttagttcaatgtggagaaaatgttaggaaaggggttacgtttatatgtaattgctgtggatgttgctgtgaagcaatggtagcagctaaaagatttggaaatcttcatccagtacagacaacaagttttataccaaatataaaccatgaaaattgtgtaaagtgtggtaaatgtataactgcatgtccaatagatgcgataagcaaggttaaggaagatggtaaagaatatataaaaattgatgaggatagatgtttaggttgtggagtttgtgttagaaattgccataaaaatagcattatgttattaaagagagatgaaaaaataataactccagcaaattcagtacatagagcagttctcatggcaattgaaaaagggcagttacaaaatttaatttttgataataatgctctggctagtcatagagctatgggagctatactgtcagctatattaaagcttgaaccagctaaaaagattttagccagtaaacaattaaagtcagtatatttagataaattgttaagtatgaatgataaatagaaactaacttaaaaaaggcaaagttttagacttatctatatcttaataaacttatcatttaatatttaaatttaatttttacacatataaaacttataacttaaataaaaaaaggctatattcaattaatattacttgaatacagccttttttagttatgttaagctatttcttttatttgcttaaatgagttttcatttccatttccaccaatttgtgttacagatttaaatctcatagttttaaatagttctttttgattataatctagtgagtttcctactagcattacaggagatttagtttttccagccaaaactccaacagataatccgtctattaaatcatcttgtttattcattccatttttagcaacatataaattgtctatcttagaatccttgtaaaattcttttattacttttgcattagtttcatttctagtgttacctgatattctctgtggattttgaagtttactttctatatttttagaaactgtatattctccaccgattacataagatttatcaatctttttgtttttaaataagttatttatttcagttatattactattttcattagtaagtattataggcatatcattttgagctgatacagctccaatgcttactgcatcggctaatcctttttcgccattaactactgaaatctttgatatattgctaatattgttcaattctttagcaatgttcatagaagtttgatatctatcacttcctgaaattctagatacagagatattgtttgattttatagtatctaaagatttttcatttatagaagcctctccaccaactacatatacatttttaacttttaatctctttaattcagccaaagttttttcatttatttgagagcttccagtcaataatataggagcgtttttcttgtatgcaaatggtgttgcggccaaagcatctgcaattgctgaatcgtttattaaaactgcattttcagcattttcccaacctgcttgacttatcttaatagaagtttcatatctatcagttcctgtaagtgcacttgcatttacttcatcttgatatgtaacctcaaatctagcatttggacttcctaagaaaacaattacgcctccttttggcaatctaactctattgttctttgtaactaaagaatagtttacaggaacacctttatcatcataaacagcaaaagctgaattttgaggaagattaacttctatttttttatttgcgatatcgtcaccaatcttataccattttgcataaccattggattctagttcacaagtaaaagatttttctgctggcaaattagttatagaatcttcactaacatacgttagtgttccaaaagataaatactctgtaccattttctttatgaagtttaatgtcggataaatcacgacctattacaccaggtatttctataaaagcatttgagttattctcatccattattttagtgttaactatataacctggagtttcatcagaaagactaaaacttgcttttacagagccaaacatatagctttgagaagtatatttttcatccactagatagtaacctttgccacttctttttttccacacttctttgacactatttgatatattgttgtcatctactttttgagctacatagtataaacttgctgtctgacctaatccagggacatcatcataagagctcatatttaaatatgtgatattatttttttcttttacaaattttaaacaactgttacccttttcagatacaaatctatcttgacctatgtatacgtatttatcttcaggtccattttctatataaggagaagatactgttaaagtaccattatcattaacatctacttttatcatatttgaagaagcataaagaccactattttcttttagagagctaggcattttaacttgttgtggcttactaaatgttttatcaggttttatttctttaattttacctttttcttttaatgcagatagtaagatttcttgtccaattatttcgttaagttgactacttccaccagaagaaagaactgcaactgccatattttcatctggaagaactataagattactgtggaataataaagagtctccaccttttgtaagagcttttaaattatactgattaaatggataagtgttgacacaatcccaccctaaaccatatccaagtatagaatcttctccttcaggccatagaccatttaaatattctttgttttccatagcttttactgaagcaggagaaagaataccatttgaatttttcataaatgtttgtgcaaatgtacatagattttctgcacttgaatataaaccacctgcacctatagcattaaggttatcttgtggaactgcatcttcccaataaggtacatatgcttttgctagttttgaactatcaaaactattttctgtagtttttgtattttgtaagttaagtggattatttatgtatttatcaagaaaattagtaaatgacataccagatactctttctactaaaatttcagctaaagtaaatccatcattacaataaacggaaaaagctcctggtttagcttttaatctttgtttttgtaattcttttaagaaattatcatgaccataagaatcattgtctgctaataaaatagtgtttttaaaactacttcccatcaaccctgatgaatgatttaataacattcttggagtgatttccttgtatctatcatcagccattttaaattcaggtatatactttacaacaggagtatctaaatttaattttccatcatcaaccaacttcataacagctgttgtagtaaacattttactgatagatgcgatactatacatattatccttatttaagtttttgttatcctgtttgctgtaaactccaccattaccagaaatctcaattttgccattatcaatcaaagcatattgagcacttacagcaccatactttgatagcaaagtttggattttctctttagcaagagctttagtttttgtgtaagattccgcgtttttactataatcatgtaattctatatcagaactttgatatttttcggaattatcttttgtattatcagcaaaagtaatatttggagcagcagtaaataacatactcaatactaatgtactagataataatttagagatcctttgcttaaacatattacattacctctttccctttttaataatttataattagcataacattcttaattattttaatcaacagattattatcaataaaaaaagcttttataagtatagctttttatataacagagaaaaatataaaaataatatttgttgttgtataaagaataaagggtataggtaatatataaataaaatggaggaattttagacatatgtataagaatataaataagaagcaacttaaagaaatgatgaaaaatgaaaaggatgttttattattagatgtaagaactaaagatgaatttaaggaatataaaatagaaaatgctataaatatatctttacaagatttaatcaataatatagatgaaatttacgattataaagataagaaagtagtagtttattgcagaagtggtcatagaagtgttactgcatgtaatttgttagctgaagaaggttttgagcatttatataatttaaattcaggaataattgattatatgagttaaataaggtaagttatacattaaatactatgtatagctctgtttattaagtaggaatatatctaaatatttataagataaatttaggaaagaacgaattttttcgcttttttctatgacagtttttgtagtaaatattagtttttaagttggaaaaaggtagtagctttttagctactaccttttaatatgaacttagaatattattaaaaaaatatatttaaagacagaattaattttttaatgaccagttaaattactatcgccaaatttatcattaaatggttttataactctatttataggtccttttagaagtacgtttaaacaaatagacagaatcataaatagtaatagaactagtatatctttagttagatttggagcatatataccaccaactgcttcccttgtagcacctattgcataggtaaatggcattatagggtttattctttggaagaatgtaggtgtaacttgtatagggaatgtaccaccagaagaaccaatctgaacgactaatagtactattgcaattgcttttcctacatttccaaatacagaaactaaagaatacactataaagttaaataccatactagtaaacataagcagaactatcaataaaattggatgttttgctgttactcctaacaataatatatctccagttcctattataaaaccttggacaagagctatacttaaaaaagtaagacctcttccaaagtaaatttcataaggtttatagtttccatgtacagatgtagacaatagtgctgaaataagtaatataccaacccatgtagaaagaacactataaaatggtgtcattgcagaaccataattttcaattggatataatttctctgttttcacctcaacaggttcttttaagaaattagactttgtcaatatatcactttcaagcaagctgactaattttttcatatcttcaccattactaattttgcttaaagtatcaatcaaatcatccaacattccttttgctaaaggaagtctttctcttatcaatgatatactttcctgtgcatttcctgaaagttttagagaagtagtaagtatttcttcaacctttggaagttttgcttctgccttatctaaaacagtaattatatcatttgctacttttatactgtttgcaaatatactatttataggttttgatatttttgagtcaaaattatttaaaatatttaaattaattcttccaataccatttgatagacttaaaacattattcaaagcacttatagatggttgttgtccagatataactttgtttttaatatcatttaatgttgatatagatgaatctattttattgctagagtcttcaagattatctattacatcatccaatctattatttgatgtaagttggtttaatttagttaaaaagtccaccaaagtatcgtttaaagattgcaaattagaaagtttttctgataaattatctatcaacttaggtacatcttcactgccactatttactgcatcaattaaatttaatgtaagagaagaagcagaagatgaaaggtcaaccattaaatttaagtcagacttaataagaggagaaagttcgtctaaattatcatttgtatcctctaagaatttttttaagtcacttgataatagttttgtatcattcagagtctttttaattgtaggtaaatcagatttaatatctttaactgtatcagataattttgaagtagcatcagaagctaaatccacagtcttatttatatggtcaaatctcttttgaaggtcaataagggaattttcaacttttgtcaattttggaagactgtgttcaattcctgcaccaactccgtttgatataccaagaacgatttcactaactgtttttactatagtctgattaacctgtagttgtattgtagaagcacctttatctgtaatctttggtgcaactgcatttattttttcattaacagtatagataatttcgccttttttaacatcatctgtaattaaagatgtcaaatcttttgtaaaattttttggaatcttaagtgatgcataataagtaccttttttaacaccttcaagagcagttttttcatctacaaactgccaacctaaactcttgttatctttgagttgttcaattaattggtctcctacattaatcttttgtcctgctatttcatttcctttatcttcatttgttactgctacaagcatattagcagtgcttccataagggtcccaagatgcctttatattgaaccaagcatacagagatggtaaaaaagcaagacctaaaactattacaagtacggcataattgccacgtatatcttttaggtcacttttaaaaatttctaatatattttttaaaccctttgaaggtcttaaattcttgatattattccagtttaaaatttcttttaaactattagtttttttcaaatgtctcacctcctaaaatattttgataaagaaaaaagttagatttataatcaattttaaattatattactttttacacaaatagtaaagttaaaattttgtcttaattttaatacatatatattatatataatagtatgctataaatatatataaatataggaaataaaaacaaataatttataaaatatatggtataaaaattaataataaatcaaatatttataattgatataatcaattaaattagccattatgatatacttttggtaatgagaaaattctatgaagggatgattgaatgaagtattttaaaaaatacataaaaaaatatatagtattatttctaacagcagtattttttttaacattggaagctttttgtgatttagctcaaccaactataatggcaaaaataatagatataggggtttcaaataagaacctagactacatactatcaacaggagctataatgataggtataacttttttaggtgcaatatttgcaataataagaagtgtaatctcggcaagagtttctcagcatttttcttatgatttaagacaggatgtatttgaaaagataaatacatactcattaaaacaaatagataaatttggtagagcttcgttaataacaagaattactaatgatatcaatcaaatgcaacaattcgttaatggaatgatgagagtttttataaagtcaccaataatgtgtataggaagtttaattatagctataaaattaaatttaaagatgtcaataattattctaattgcagttttaattatatttattataatattgcttaatatgaagatagggtatagattatttaaaaatgtacaagaaagtacagataaagtaaattcaaaattaagacagtttttaagtggaataaaagtagttaaactattttgtagatacgattatgagaaccaaagctttgaagagttaaatgatgaactttttaaaaatagtagaaaagctacaactatgatgtcattttttagaccgacaattacaataatcattaatgtttccataataataatattactgattggaaggcatttaatttattcaggagaaattaaaattgggattatagttgcttatgtaaactatatgactagaatattaacatctcttataatgatttcacatgtttttaatgtttttgttagggcaaaagcatcttatgagagaataagtgaggttttggttgatgagaatgaagaagtaattgagagagaagaaagtttagatgttggagaaaaagatttaaagtttgtaaattgtgatataatttttgaaaatgtagatttttcgtataacaaaaatacagatgaaaaaatattaaaaaacgtatcctttaaaatagaagaaggtcaaaatattggtgtgattggtcaaactggttcaggaaagacttctttagtaaatttaattcaaaaattatatataattgataaaggtgatattaagattggaggacgtagtatatacagtatttctgaagaaagtttaagggaaaaaataggtgtagtatttcaaaatagcagtgtgtttggaaaaagtatactagaaaatatagttatgggaaatgagggtataagtagagaagatgttataaaatcatgtgagatagcaaatgcaaatcaatttataactaaactcgaaaattcttatgatgaggttttatttcaaaggggtaaaaatttatcaggaggacagagacaaagaattactatagctagagctatagccaaaaaaccacaaatattaattcttgatgattgttttagtgcaatggatattaatacagagacaattataagaaagaatataaaagagtatataagtaatttaagagaaaaggaaagtaagaaatgtactgtaataactatttcacaaaagattagttctataattgactgtgataagattttagtcttggatgagggtgaggtggttggatttgctacacatgaagatttactggttagttctccaatttataaaaaaatttttgcgttgcagaatttagtaagtgaagatgtaaattaaggaggaagtatattgaacttaagtactggaaatcaaaaggtcagtagattaaagaaaaaagaaaagcctaaagattttaaaaaaacgtttaaaagaatttttatgtactttaaaaaagataagaagattactagatttatttttttgctagtaataattgattcaattatatcaactgtaataccatatactattggaaaggtagttgacataatagatatcgatacttattcaaaatccattttcttaaaaggaataattattttactttcattttatataattgagttttcagttaaactgtctaaggggatatgtacagctagattatctcaaagtatagttaaagaaatgagaagtaatttatttttaaaatttaaaaatctaccaataaccttttttgataaaagttctactggagatattatgagtagagtgacaaatgatgttgataatatcagtacaggaatatcaaattcattagtacagttaattacaggaatcttaaacatattgatgacttttattatgatgtttgtattaagcccaattttaacattttgcagtgtaatattaataccgatagtaatgtttgtgagtaattttattgcaaagagaactagagttttttttaagcaacaacaagttgagttgggaaaactaaatgcacatattgaagaaatgatatcaaacataaatgtagtaaaatcttttaattatgaaagaaaatctgtaaatgattttaaagaagtcaatgatagacttctaaatatttcccttaaatcgcaaatttacacttctcttttaatgcctattatgaatgtgattagtaatataggatttgcaactatatgtattataggaggtgttcttgcatctaaagatattataaccataggggttatagctagttttttaagttatgtaagacaattcacaagacctttaaatgaattagcaaatctatttaatacattactttcagccatagctggatgtgaaagagtttttgaaattatagatgaacaagaagagcaagaagtgcataacatgtttaaaagtgagattaacgataataaagatggtaatttaaactctcattttgtaaagggagaaattgagcttaaagatgtaagtttttcttatgattcaaaaaagaaaattttagataatataaacctaaaaatcaaagctggcacatcaaatgccatcataggagagacaggaagtggaaaaacaacgattataaatctaattacaaatttttatcatatagatgaaggaagtatatttttagatggtaaggatatatactctattaacagaaactatttgagaacttgttttggagtagttccacaagaaggttatatattcaatgatacagttatggaaaatataaggtatggaaatctggaggctactgatgaagaagttatatatgctagtaaaatagcaaatgcacataaatttatagttaaaatgcgtgaaggatatagtactgtattatcggataggggtgaagatttaagtgaaggtcaaaaacaattaataagtattgctagagcagtattaaaaaatgctccaatacttattttggatgaggctacaagtaacatagatatagcaacagaagctaaaattcaagaagcaataaataatttaacttatggaaagacaagtataattatagctcatagattaagtaccatatcaaattgtgataatataatagttttagaaaatggtagaattgtggaatcaggaaatcataaagaattgataaaattaaagggacattattatagaaacatattattgacacagggaaaataagtatttagaaaaaacttttaaaaaaattgtttaaaggtatatggtgcgggtatatatagactaacttaataaataaaaaatttaatttgatatataaaatttaggaggaaagtaattatgaagaaatttgtttgtacagtatgtggatatatacatgaaggagatgctgcaccagcacaatgtccagtatgtaaagttggagctgataaatttgaagaaatgaaaggcgaaaaaaattgggctgatgagcacagaataggagtagctcaaggtgtagatgaagaaataatcgaaggattaagagctaactttgttggtgagtgtacagaagtaggaatgtatttagcaatgagtagacaagctgatagagaaggttatccagaagtaggagaagcttataagagaatagctcttgaagaagctgaacatgctgctaaatttgcagaacttcttggagaagttgtagttgcagatacaaaagaaaacttaagagttagagttgatgctgagtatggtgcaactgatggaaaattaaaattagctaaaaaagctaaagaattaggactagatgctatacacgatacagtacatgaaatgtgtaaagatgaagctagacatggtaaagcattcttaggattattaaatagatattttggaaaataaatttaatataagttaagtagatttttaggagtatatcatttatgatttttaaaattataatgatatgctcctttttaatagttgtattttatattttttatagctataatcttgtaaatatttaaatcattataaatatagttttaatgaaattaattttttagttttattatctctgatttatgtaataaatagaattaatttgatttaaacatatatttatgataaaatatgagaaataaataagaatttaattagaaaggagtatttatagtgtttaaaactgtatttgaagataaagaatatgttttattatgtaagaattattctaaaagtgatggagtaaaagcaatatttatttatttgatatctatgttactattgtttttccaaggttatttgtatacaacaaatttaagttcaacaattttaactaactcacaaatgatattgtcaatcttgattttacttatagggctgggatttgtactactttcgaaggaaaaactaaatacgattgggattacaatgtgaaatttaaataaaagtcttttgtatggagttattggtgctactgtactcgtaattttcgttattttaacagctggaattatgcaaggaaaaaaagttgattttcaattacctactgtttttatgattgttacatttattgtttctgctatttcagaagaaattgtttttagagggtatattcaaacaaggttaactggattaataaaaaatagtgtactttcatcttgtattaatgcttttctttttctatctacacattaccctgtaaaatggatttcaagtggagatttttcatttgcaattctatctggattttatgtgatatgccttatattacttaacttttcatgtgatttagtatatcgaaaaactaactgtctgtggggggcatggctactgcatatcttgtataacattggcacaggagtgctgatttttactacttagtcaattttactttgcagaaagtttatcgtaagaaacggattattttataagtcaaattttagagctagtaaattgacatacttaaaataatttaaactagatgtaaaaaatatcgacaggtggtggacaatctgattaagtatatacataaaagtaatatagctattgttgtactgcatgaaatttatggagttaataattttataaaagatgtttgtcaaaagtattataaaggtgggtatgatgtgttttgtccagaactcttaggagaaaaaagagttttttcatacttaaaagctcaagaagcatatgatttttttataaataatgttaagtttgatatttataaaaaagtagaaaaacttataaatggtttaaaatcggagtataaacatgtatttgtagttgggtatagtataggtgcaactattgcatggagatgtagtgaaaactctttgtgtgatggtataatttgttgttatggctcccgaattagagattatatggatgtaattccaacatgtcctattttgctagtgtttgcaaaatacgattcattcgatgttgattatgtttcttctcaactttctagaaggcaaaatattcaaattgaaattttagacgcaaatcatggttttattgatacatactcaaaaaactattctaatgctcaaacagaagtttttaatattaaagaaaaaaactttctatctaaatgtttaggctaatatgttttattataaaatatagaaaatttaatcaatttgaaaaacataatgacactactaatgttaaaaaatattagtagtgtcattatattttttgagatagagatagtcagtagaatcatagaattaattatgtttttatgattgtattagattaatatttaaattacattgaaaagaaaaaaatcattactatagaataatatctttatcaaaagaacattcttatgcagaatatggttatgagtatctaagagaaatctcaaaatatataggatagcagtatgaatttttatagattttattaatacaataaatcaaatgagaaaaaaaatcaaaagaatacaataatcacttgcaaaaaatatgctattgtgatagacttaaatcaaaattaggaattgtaagaataaggaaaaagataagtaattattttaacgagtcaaaatttaagaaattgtgatttatatataagatagaggttgtttgtaaatttaaattggttgaagaggaggaatattatatgatgccattgatattatcaaatacaggtgaagaagtagttataaagaaaatttcgggaagtgataagacgaggacttttttaaatagtataggttttgtagtaggtacaaatgttaaaatagtttctaagatagatggtaacttaataatagacgtaaaagatactagagttgcattagataaaaaaatggcaagtagaataataatatagggaggtaatgacatgaacagactgaaggatattaagtgtggagagactgtaaaagtcaaaaagttagaaggagaaggagctacacgaagacgtataatggatatggggattacaagaggtgttaatatatttataagaaaagtagctcctcttggtgatccaattgaggtaacagtcagagattatgaactatcaattcgtaagtcagatgcagaaaaaattattgtggaataataaagattaattagagtagggttaatgtaattatataatgagaatgattttctgtatcacaaacagtgatgtatttaaataataatggagggaatggaaatgtcaataaaaataggtctcataggaaatcctaactgtggtaagacaacaatgttcaatgggcttacaggctcgtcgcaatatgttggtaactggccaggagtaacagttgaaaaaaaaggtggaaaattaaaaggaaataaagatgtggaaatagtagatttaccaggtatttattctttatctccatatacattagaagaagtagttacacgtaattttatgctagatgataagccggatgcagtaataaatattgtagacgcatcaaatatagagagaaatttatatcttacaactcaagttttagagctaggtataccgaccattatagctcttaatatgatggatattgtaaataagaatggtgataagataaatattaaagaactatctgaagttataggttgcccagtggtagaagtaacagcagttaaaggtcaaggaattatggaggctgctgaaaaggcagttgaacttgcaagtagtaacaataaattaaatttcaaattaccttttgttgatgaaagtaaggacgcaatagaaaaaattgaaaaaataatagaagaaaagactccatatatagatgtagaaacacgctggttagctataaagctatttgagagagatgaaaatgttatacaaaaacttgatatttctaaaacaatattgaatagtattgaagaaataactagaaattgtgaagatgaattggatgatgatagtgaaagtataataacagccaatcgttatgaatttattagttcaataatttcaagtataataaagaagaatcgaaaaggtaaggaaactgtatcagataagatagataagattgtaacaaatcgtatactagcattacctatttttgcacttataatgtggggagtttactatatagcagtaagttcattgggtactatagcaactgattggacaaatgatgtactgtttggagaaattattcaaggcaatgtaagtaattttctagcttctttaaatgtagcagagtggttacaaggacttgtagttgatggtctaattggtggagttggagcagtactaggatttgtaccacaaatcatgcttttattcttattattgtcaatattagaagattgtgggtatatgtcacgtgtagcttttataatggatagaattttccgtaagtttggtctttcaggaaaatcatttataccaatgcttataagttcaggttgtggagttccaggagttatgtcaactcgtactatagagaatgatagagatagaaaaatgactattatgttaactacattcattccatgtggagctaagattccaataatagcattatttgcaggggcattatttggaggtgcttcatgggtagctccatcaatgtatttcttaggtattgcaatgataatcatttgtggaattatattaaagaaaactagtttatttgcaggagaaccatctccatttgttatggaattacctcaatatcatgttccaagtgcaaaaggtgttttaatacatatgtgggatagaggaaaagcatttataatcaaagcaggaacaattatatttgttgcttgtggagtaatctggttcttacaatcatttaattggtcattacaaatggtagatgctggagatagtatattagctagcttaggaaatatagttgcaccaatatttgctcctcttggatttggaaattggcaatcatcagtagcaacagttacaggtctagtagctaaggaaaatgtagttggaacatttggagttttatttggtatatcagatgcaacagagcaagacccaacacttcttgcttcagttgcaagtatgtttacagtagctagtgcgtttgcatttatggcatttaatatgctttgtgcaccttgttttgcagctattggagccataaaaagagaaatgggttcatggaaatggacatggattacattaggattccaaactttaacagcgtatataattgctcttcttataaatcaagttggaagtttagttttaggtactggaggaagtattgctggggcaataatatctatatttatagcagtagcagtagtctttgtagttttaacttattcaaataaaaatatgaaaaaagaaaaaatgggtaaattaagttatatgaaaaattaattcatataaataaggagtgatgaatatggctacatttattatagcagctattgtagtagtattaatggcactagctgtaatgtatatggttaaaaattcaaaaaagaatggtagcagttgtggatgtggttgttctggatgctcaagtagtaagagttgtcatagcgctaagagataaataggataagagcctgataaaaagttaaattgctttattatcaggttcttattttttatataaataacaaatttcatatttgaagtaggttagactatgctgtaattttactgtataattatatataaatatatgattaggagggattattgctaaattaagcaatataagtgaatattatgtttaaatttgatgttacaaacgagcttatgtgtatagcaaggggaagtggtaaattttttgcaaaaaaaggtgctatggtagcctttaaaggaaattttaattttgaaaaattgctgttaggtccaagtaatggcggtggattgggaagagcattattaggtcatgttcagaggtcattgacaggagaacaaatgccaataatggtggttgaaggtgaaggtgaaatttacctagctcaaaatgcttaccatgtagatgtaatatcaattgacccaggtgattccatttatgttgagagtgaaaacttattggcattttctgaacaattaaattacagtgtaaaattgattggttcaggggtaatatctcaaaaaggtctttttactacacatttagtaaataaaacaggtcaaaatcaagatgttgctataataacagatggtaatcctctaattcttgaaggaccttgttgtgttgacccagatgcattagtagcttggactggaagagaaccatatcctaaagtatcaaaactatcatggaagacttttattggtcagacttcaggagaatcttatcatatggaatttgttgaacctggacaaatagtcattatacaaccatctgaaagattgtctggcttaaaaacagattctacaccttctgatagaatgagttcaggtggattaagacttggcatagattaaatcttatgatatagcttaattattatttaagatattaaaaaataaaaagggtagcagggatagatatgttaaaaggagttttatatgtttgagaaaattcataaaaggtttaaaggatattatatttttttaataattttaattttatggaagatagtatgtgttttgggtatatggagtagctatattctgcctcctcctgaaatagtcttagatacttttataaaaatgatatatgacggttctattttcttaaatgtttatgccagtgtaagaaggatattaataggttttttaataagttcattgatggctataccacttggagttgtatttggagtaaataaaaaaatgtatgaatatttcaaaccactatttgaatttatgcgaagtacacctccactagctttggtgccaatgcttattttatggtttggtataggtgaagaatctaaaattataattattattttggcatccttttttccaatatttttaaatacattgaaaggtataaaaaattgtgacaataaattaatagaagtaggtaaatcttttaatttatctaaaaagagaattttttataaaataataatccctaattctatgctggatattgttgttggacttagtttagggcttgggtatagttttagggctataattggagcagagcttattgcagcttcttcaggactaggatatttgatttctgatggaaaagatatgtctagaactgatgttgtattggtaggaatttttgttattggatttttaggtatactttcagattatctattttcaaagataataacaaaatttagcaaagggaagcaggttgatttaaatggttagaagtggatttttgctagagaatatatataagaaatatttagttgataataaagagcatttagttcttgataatatatctttaaatatatctagtgaagagataactgttatattaggtgaaagtggatgtgggaaaacaacgctacttagaattttagcagggcttgaaaatgctactagtggaaacatatatttttttaataatgataaaaagtgtactccaaaagtaggaatggtatttcaagaaagtagacttatgccatggctgaatgtaagtgaaaatatacttttacatactgaaaaagataatagaaataaagttgatttagacaagtatttaaaaatgatgaagcttgaaaagtttaaaaactcatatccaaatgaattatcaggaggaatggctcacagagtaagtatagcaagagcactttccttcaatcccgatattttgctgatggacgaaccatttgcagcgctagattacttcacaagaagaaaaatgcaaaaagaagttgtaaatatccataaaaatactaaaaaaggtgtagtatttgtaactcacaatattgaagaagctatggaaatagcaaagaaaataattgtttttagtaaaaataaaaggattaaacaatttagtgtcgaagatgaatataatagagatttaactaaaaactattatataaacttgaaaaaagaaatattaagggaattgggggagttttaattgattaaaagaaacaaaaagattttagcagtaatgacatctttaataatggtgttggttgggactgtaggatgttcaacaacaaatgataagaaagatgaacctgcaaaaaaagaggctagtttacctaaggaaataaatttaacttatgtaaaatcaccacttaatgttcctagtatattagaaaaaaaggatgatttatttggaaaggaatttaaaaaggacaatataaaagtcaacttccatgaattgacaacaggaccagagcaaactcaagcattagcagcaggtgagctagactttttacatgcattaggaggaacgtctgcaataatagctgcatcaaatggtgttggtcttaaaattacgaatatttatagccgttcaccaaaaggatatatgcttataactaataatgataatattaaatctataaaagacttaaaaggtaaaaaaattgtaggtccaaaagggactatacttcatcaactgttgattgctgcacttgctaaagaaggctatactatagatgatgttgaatatgtaaatatggatattcctagtgctgcttctgcattagaaagtaaaagtgctgatgtagcaatgcttgcaggtccagtggcattgaaaacgataaattcaggtgccaaaatgattgtaaatggagaaggattagtaagtggaataatagttactgctgtaagtgatgactttgctgaaaaatatcctgaattagtaaaaagatttatgaaggttcatgaagaaactttaaaatatatgaatgaaaacaaggatgaagtgatggatgttgtatctaaagaagttggtttatctttagatgaaacaaaagaaatgtattcttggtatgactttagttctaaaataacggacaaggatataaaagaattagaagatacacaggaatttttgatgtctaatggaatgcaacaaaagaaaataaatattaaagatatgttgtacaatcaaaattagaatactttaaaatattaaagtggaaaatacacccttatttattatggaaactgtatggtaaaagagggtgtatttttattattatacaaaaatacaattaaaaacaacttactattttatctacacttatgtagtctagtaattttctcattttcttacggtgaagtaaaaactttgaatatgtgtcctcggattgttttgtgtcaccataaactttccaatatttaatcatagaaacttcataattactatatcccataaatccaatcacatctttaagaggatatcctaaaaaaatacctatttcatcaggaaaaacatcactcttaagtttatttactaaatgctctaaataagcattaacattcgtattttgtttgtatcctaaaaactttaaaaagtttactgtttttttacattttaatttttctgataatgcttttttatttacaaataagatttttaatccctttttttctttatcaataactataaaatctattttcttacatttatatagatatttataaatatcattaattttttcctctctatttacatcagtaaacgaaatatttattatttcagcaggtttagagcctaaaaagactggacctaaaacctctaaaagccattttatatatgatgattcaattttatttttacaacaaaattgtgaattacaacaagacataaaagataacctccttcaaatgaaaattaatatcaagtaattagattatactatgaatgataatcaatatcaataataaaattataatttttttatttaattatttattcattatgatttccaaaaaaataaattataacttgtttaattttagtaaataaaaaataaaaatatagaaatactaaattaagaaagaaaattattaaaattttttgtagtacaaaacatctaggagggtaataaaaatgaaattaaaaagaactttatttgtaggattagcattagtattagctataggaataactgcatgtgctagggataatgaaaaaccaaatgaaaatgcaggaaaaaatcctaatgaatctgtaaataataatgaaggatatatgaattattattcaacaagttataatgattatatagcaggtctaaatagatattctatttatgatactccagaaagtataaacaatcagtttaaagataaagaatatccaggaaatgaaaaatatctaagtgatgtaaaggctgcatataaagatagtagagataaaatacaatcatttgtaacatctcttaaaaaagacggtaaaacagaagatacagagttaaagagaatgaatgatgacctaatagctgaaggggaaagattagtaaaagatatagatgagagaatagaaaaattagataaggtatctgatgaagatatgaaaaaaggtcaaaatgattttatgaaactagttcatggaactgaagatgttggaaacgatattggtagtggttttagaaaaatgataaaagatatgaatgatagattgggaataacaggaaataataaaaaataatagagtaaatagttttaaagttagaaataaatatttgaaatatagcgaagccttgtaattaatatattttttggcttcgcttttttgtatgttatcaagatactaatttttatcttgtaacctcatattttcattatagtttatttagaggttatttttttatgtttttacttgttttttctctttttaaatttttgttttgcaaaattgtaagattcttctattaaagttttaaagttctcaaatgtcttttcagtagggcttaggacgcatatccatcccatccatgagtagataggatgtggcatgattgtgtccaattttgtaaaatcaaaatccatatcaactatttgccctacacctggacgctttggaatatatccaaacatttcaataaaagtttctttttttaatcctatattcacacggtatacatttggacgactaaccaacgaacctttatcatgattactgtctttttctttaatggtaagaacatatacccctcgctttaaaacaccattaggattgtagtaaattgctcgttccccccaactatccattagtacaacatcatctaagtttgatagacaataattgagaatatcatcagccttaatagtatcattttccataaaatatcaatcccttctttctttaatattattattgctttagatgcaagaatatcttatcatataatggtgacaattattgtcactatatttaaattaggagtatgaatatgtcaagagctgagcgtttaattgaactgatgataacaataaatgcaaaaagaagttttacagcgggagagctagcagaagaattttctgtatcaaaacgtactatactaagagatttacaggtattggaaagtgttggatttccactatattcaaaagttggagcggctggaggatatcatgtacttaaagaacgtatacttccaccaattacattttcagagagtgaggtaaaatctatattctttgcatatcagtcactagagtattataatgatttaccatttgagcaagaaactatttctgttttaaagaaatttttaaattgtataccaaatgatattcaatataatattgagaatatgagacgtaaacttgttttttggacaccagataggcattgctcaacaccattattgaaggaattgtttaatatagtaatgaatgaatttacaattaaaattgaatattcatcaaagcaaaaaaatagtatacgtaccattgttcctattggtttgtatgctatgaatggactttggtattgtccagcttactgtataaaatcagaatctgttaaggaatttcgtgcagacagaattgtgaagattttgagtatagaaaacttatcaaataagaaatataaggttttatcttctatacatgattatcttaagaatatggaagtaggtacagattatcatattaaaattaatctgacagatgagggagtaaaacgttgtgaaacagaatttttgttggcaagaggattgaaaattttgtctaagggtggatacatagatatgtatataccaaaatctacacttaattgggtggctgaatattttttaacttttggaaaaaatgctacaataatagaacctatagaacttaaacatttgattaaaaaatagctacgcacacttgtgactttagtcatgagttagtagctaaattagtcagcatatagggaaacttatatgtagagataggataacacctatccaatactacttgaattgctaaaaacccctaaagctaaccaaactaaaacataaggatgaaataaacctaagtgtgaaagttacgaaagtagaaaaaattggttagatggtataaggttaaatcctaagtactttaaaatgggcaatcagcaggtaagctccgaataggagaaacttcaacgactattcctcttgagggaagtacactacaagttatcggtagtggaagtgggtagaccttagcggataatgccgaaggataagatatagtctgtgcttgcatgaaagtgtaagaagttcataagagaactgcataggtactagcgaacttatgtgaacgacaacctcaaaaatgataaaagttaagacttacggttcttatatatgttatttaaaaataaatataaaaaaccttcaaaatacttgttttaagtaattgaatattttaatattatgataggtgatgaaaaatggaagttactcatggtagaggatatgcatatagtatgtcaaatatagaaataatcagaaaaaacaagtaaagtgaggtgatagtagtggaaaaagcttataagtttagaatgtatccaaataaaaaacagcaagagttaattaacaaaacttttggatgttgtagatttgtatataataagtatcttgctaaaagaatagaagtttataaaaacaataaagaaacttttacttataaacagtgtagttctgatttgaccaacttaaaaaaagaattaaagtggcttaaagaacctgacaaattttcactacaaaacgccttaagagatttagataatgcatataaaaaattctttaaagaaaaagtaggatttcctaaatttaaatcaaagaaaattaatagattttcatataaaactaactttacaaatggaaacattatgtattgtggtcaacatataaaactacctaaacttggtatggttaagataagggataaacaagtacctaaagggagaatacttaatgctactatatctaaagaaccaagtggtagatattatgtatcattatgctgtactgatgtagatattgaagtatttgaaaatactaataatcagataggtttagatttaggaattaaagaattttgtatctcaagttgtggagaatttatagaaaatcctaagtatattaagaagtcattaaacaaacttgctaaattacaaagagaattatcgagaaagacaatcggtagtttaaatagaaataaagcaagattaaaagttgcaagacttcaagaacatatagctaatcaaagaaatgattttctacaaaaactatctactaaattaataaaagagaacgatattatttgcatagaagatttacaagtaaagaatatgattaaaaatcgtagactatctcgcttaatttctgatgtatcatggtcagaatttgttcgtcaattagaatacaaggctaattggtatggtagaaaaattgtaaaggtaggtaaattctttgcaagttcacaaatatgcaataaatgtgggtataaaaacgaggaagtgaaggacttaaatataagagaatggatttgtcctagttgtaatgaaactcacaatagagatataaatgcaagtataaatatattaaaagaaggattaagactaataacaattcaaaataaataacttatgtaagaaccgtaggaactacggggatagcctgtggagaattagtaagacatattttagtatgcaaaattctatgaagcaggaaccctgtgactttagtcatgggaggttcagaaagtctaaagtattagagctatataatcatcattgtatttaaattattttatttaatagtaggatagagtttggataaaatgttaattttcttaatttactttacagatgatttagatagattgatgttatttaatttatttcttataatgatgttctatagttatatagacattaaaatataaagtgttaggagctagaaaactaattaaaaatagttaattaacgataataaaaaataaaaaatttaaataaatttattgacaaatactattaatgaatatatcatatataacatagcaacaaatgataatagaattgaattaaataacgtcttatcaagagtggtggagggactggccctttgaaacccggcaaccagtatattttatatacattggtgctaaatcctgcaactaatatagttgatagatgagtataaatagctttctaagcctgagtttatactcgggcttttattttgttgtaatacataagagaggataaacataaaaactgagcagaatatatgggaggaaattttatgattagcataaaaaatgttaataagtattatggaaagattcaagtgcttaaagatgtaagtattgaaatagaatctggagaaatttttggaataataggtcatagtggtgcagggaaatcaacactactgagatgtataaacggattagaagaataccaagaaggcagtgtacttgtttctgataaagaagtaaagtcattgaatgaaaagcaaatgagagatttaagaaaagagttaggaatgatttttcaacacttttcattgcttgaaagaaaaactgtatttgataatgtagcattgccattagaatgttttggatactcaaaggcagaaattaaaaaaagagttttagagttattagaagtagttggaatatctgaaaagaaaaatgataaacccagaaatctaagtggcggacaaaaacaaagggttgcaattgctagagctttagcactaaacccacaagtacttctttgtgatgaagcaacttcagcattagacccaaatactacaaagtcaattctttcattgcttgaagatataaataaaaaattgggaataacaataatagttgtaactcatcaaatggaagttataaagcagatttgtggaagagtagcaataatggaaaatggagaagtattagaggtaggagatacagaagaaatattcttaagaaatactaaaggacttagaaaattaataggtgaagaaagtataatattgccaaaaggaacaaatataaagatactattccctaaagatatttctaatgaagctattattacgactatggcaagagaactaaatatagatgtgtctataatatttgggaaattagaacaatttaaagatgatattttaggttcacttattataaacatttcagataaaagtggagagcacgtaaaacaatatctaactagtaagggcataagatgggaggaaatgataaatgaatagtttaattgactttttaacaacactatttccaaatgcattgttacaaactttgtatatggttatagtaccaactatagtggcaacaatattaggatttatattagcaatcatattagtagttacaaaaccagatggattaaaaccaaatagcacaataaatagtgcattaggatttatagtaaatatatttagaagtttcccatttatgatacttatagttgcaatgattccaataactagattaatcgttggaacaagtataggggaaactgctgcaatagtgccaataactattggggcagcaccgtttatcgctagaattatagaaagctcattaaatgaagttgataaaggattgatagaagcagcaaaatcttttggagctacaaaaagacaaatagtatttaaagttatgataaaggaagctatgccttcaatagtatctggaattacattatcaataatatctatacttggttatacagctatggcaggtgcagtaggagctggaggattaggtaatatagcacttatttatggatatcaaagatttgatacagcagtaatggtatatactgtaatagcacttataatattagttcagataatccagggagtaggaaatctggcttataagaaactaaaataaattaattataaacattttaaagagggggagtaaaaatgaaattaaagaaattattatcagtagcattggtgtcagcaatagcaatatcagcagtaggttgttcaaacaaagaggataaaaaaatactagtaggagcttcatcaaatccacatgcaaagatattggaagttgcaaaacctttgttaaaagaaaaaggatatgatttagaagtaaaaatatttgatgattatgtacttccaaatacagctttagatgaagggtctttggatgctaacttctttcaacatattccatttttagaggaaactgtgaaggagaaaggatataaacttacttatacatctaaagttcatatagagccaatgggattctattcagaaaaagttaagtcattagatgaattaaaagatggagctgttatagctgtgccaaatgatgcaactaatggagctagagcacttaaattattagcaaaaaataaattgatagaagtaaaagatggagagcttataactaaaaaagatataactaaaaatcctaaaaatatagtaataaaagaaatgaatgcagagcaattaccaacagtattaaaagatgttgacggagcagtaataaattctaattatgctttaacagctaacttaaatcctactaaggatgcaatagtaatagaatcaagtgattctccatatgtaaatataatagcttgtagagaaaataataaagatagtgataagattaaggctttatcagaggctatgaatagtaaagaagttaaaaaatttatacaagatgaatataaaggaagtatagttccagctttttaaactgaatatacaaaatctacaaaatgagtaaaattaaaaatatttactcatttttttttataactagaaagtgacaaattttttggaagaattgtggtaacatatttataggtaaaactatataaaaatgaagaagtggtggggaatatggaatctaaaggaactttaagtaagaataaggtctatatactagctaatgggttatttttggttattgcacttttaaatataaatttgtatacagtttctataaatatgtatagaataattttactttggatatttggatattctatagtttatataagtagctttaaaacagatgaatttataaatatattgaaagtagggtgtcttgtattagtttttgtaagtattttaggagtagtaaatttaaaaattcaaaaattccaaattgtattgcttaacttaagcataattaatatgtctacttttatatacttaaccatttctaaagtaaaaaaactaagaataagcccaatactaattttttatagtgcttttgtgatattagattactttataagaaatatttttagtgatattaactggaatatgattattatattaattaatatttgtatatctatgtttaatttactatatttgttgaataaacttgatagtaacattgagcactataagttaataaaagatttaacatattttgttttttttacaactattatatgttttgtagcaatttctaagattaatatagtagattcagatagattaataggagtaatatatttactattatgtaaccatacttattatgtatatgtatacagtcttaataatagagtagtgtatccatattatgaacttgattcaatcaataaaaaattaagtaaaaagtcagagcaattaggaaagataaatttagcaatagaaaaggatatgattatacaaagaacattaaaaaactacatagaccagagaaaagaattacttagacaagctctggatacaataccaaatgtatggatagtaacagactatgattttaatataagttacacaaataataaatttaaagatgaattttcaaaggatatgaataattattataaaatattaacttttataaaggaagatgaaaaagttgctgaaaaattgaagaaatttgataacgatataagtataattgataaactggtagagttaaatgataaaatttatttgttaagtttaagtaataataaagatgaaagcaattacttaataagtttaaatgatattacaaatgaaatcaaaatagatgaagaaataagaaatataaataaagactatgaaaacattatactaaatattccatctcctatacttgtaagaagtgctgaaggtggcataaagaagaataaggtaataagtataaataaaaaatatgaaaagagttttaaatgtgtttcaagtgatttagtcgatatgacattagaacaatattttgaaacttttaacatagatttctttgacaataggaaatttaaaagattaaatctaacacaagaaaagaaagctgaaatagtaagttacaatgacacagcaaactgtatagttaattttgtgatgtctgactcagaaggtgaagaacatgttgaagaagttagagttggagactattggtcagataataaactctttaaattgcttacatttagagatataactaaagagataaatattcttagaacagtaaatgaacaaaaaataatatatgaaaaattacttgatgttataccagaggctatttttcttgaggatttaagtacatcaagagtactatatacaaatagagcctttagagagttgttcggaatttctagtgatgtattaggagttacaacacaaaaatatagaaatatattagtaaaaaaatacataaacaatttaaatataggagaaagagagaagagtatccatatagtaaatgaaaataatcacattaaagaagtaaaaatgatatcaagaacattatactttggacagaaaagaagtagagtgagaattattaaagatttaagtgtgcaaagagagtctgaaagacttaaaaaagcattaataaaacaaagacagtatgaccaaatgaagatggagttttatgctaatatatctcatgaacttaagacacctttaaataatatatatagttcagttcaacttattgaaaacctttataaaaaaggaaaaataattgattttcaggatatactaaaagaacatataaaaataactaaacaaaatatgtttagattattgagattaatagataatataataaatatttctcaagttaagtcagacatatataagattaaagcagttaattttgatattattgacataacagaaagaatagttacatctattagtagttatgctaagtctaaaggaatagatttaatttttgatacggatgaagaaactgttatggtagggcttgacccagaatctatagaaagaataatactaaatatattatcaaatgctataaaatttactttagaaggaggagaaatccttgtaggtatatataaaaaagacgaaacagtagagataattataaaagatactggagtgggcatagacaaagaaaaattaaatgatatatttaatcgatttaaacaaattgaaaacagtggtatatcaaatgaatttggaagtggtataggtttatgccttacaaaatcattgattgaaattcaaaatgggaagatttacatagatagtaaggtaggagaaggaactaatgtaaaagttatattcccaattaaagaggttgttgaagaagtatatgataattcaaattacaatgataatattgaaaagtttgagatagaattttttgatatatataaataataaatggctaaatttattgtttatatatatcacattaataagagttaattttatttattactttagttgtatttgatgcgttttaaataaattttatgaggtgaaattttggaaaaggatttttttagaaaaaatggaattgatttagccaaatcaatattaggtaaatatctaataaggaaatatgaaaataaagtaattgttaccaaaatcatagagacagaagcatacatgggtgtaaatgataaaggagcacatgtatatggcaataaaaagacagatagaactaagccattatatttagatggtggacatatatatgtttatttaatttatggtatgtataattgcttaaatttatctgcaaatatagaaaatgtgccagagtgtgtattaataagaggggtagagcctataacttctttagatgagatatctatgaatagatacaacaaagcttacactgagttgagtaaatatcaagtaaaaaatattactaacggaccaggaaaactttgcaaagctttaaaaatagatagaagtctaaatagtaagagtataatgggtgaagaattatatataagtgatttttattatgatgataaaggaaaaaaagtatttagtaaagatgagttagatataaaaactagtaaacgtataaatatagattatgcagaagaagcaaaagattttttatggcgtttttatatagaataagtttttatataggtaagatatgtatctataggaaggtattttataggtatgtatcttatttttttatagaatttttagtttgataaaaataactttatagaattacaaacatatttaataaatttataattattttaatgatataaagaaagatatattttggcgaaatgagctataaaaattaatttttttgtgtattttattaaaaattataaaatttgtatagataattagtttattttataagtaataaattaattattaaagaatgaagaaattttgacaaaaaaagaaattatatttagaatatagatatatttacaagaatcttattgagatgatattattttttatcataagcaattcttgttaaatgagaaattagaaaataaaatataaatctacataaaatacttcaataactcttgacaatctaaaaaatgacaaggctgtatataaaaaatatatatagtattaaactctaaaataaaatatgttgtagagtaaaaaaagacattgaatagatatcattaaattgtaaaattatgttataattgtactaaaggatgtaataatgtgtagaaataataatataatttgaaattttaataattaaaccagaagaagactacatgaacaacttaagttttattatataaagagtaaatgcttataaaaaatgtatctttagttggcaagattaaatatacatatgtgaaaaataaatcgtaaataatcgtaaaaatgtagacaaaaaaagattgataaattatagtaatacttataaaaattttttttaaatgaaataaagataggttcagtacctatatttatatttttgtatttatattatgaaaaaattaaaattatttaggggtgatggttttgaataaggacataggagcaaaaataaagcaactcagaactcaaaagcaaatgacgctgaaggatatgagtgaaaaaacaaacttgtcaattggttttttatcacaacttgaaagaggattaacaagtgtggcaacagattccttaggaaaaatagcaagtgtactagatgtagaattaacttacttttttatgaagccaaaagagcataaaagagctgtattaagaagttatgaaaaagaagtatttgatgtagaaaactcaacatttatacattatcatttatcatctagtttaaaggaaaaaacaatgctaccaagattaattgaaattcttccaagtaagagtagtgaggaaatttgttgttacgtacatgaaggtgaggaatttgtgtatgtattagagggtactcttacagtgtttttgggagatgaacaaatagaaatgtatccaggagacacaatacactataatagtgaaaagaacaatcataattgggtcaactatactaataaggtagtgaaaattttggtagtaagtataccaaatccatttgaaaagtctgatgcagttaaagaagcttaaattttaacgattactattagtcaataaggaggtactaaagtgaaaaaaattggattcataggtgcaggaaatatggcaagcgctatgatagggggaatagtaaattcaaaattagttgaacctaatatggttatagcatcagcatatagtcaaggaactctcgatagaatagatgcaaattttggaataaatactacaaaagactcgaaggaagtaactagaacctctgatatagtaattgtagctgttaaaccagatatatatgatgatattttggaagagataaaagactttatagatgacaataaaattatagttacaatagcagcaggaaaatctataaaggatatagagtcaattataggagaagataaaaaaatagttagaactatgccaaatactccagctcttgtaaatgaagccatgtcttctctttctataaataaaaatataaacaatgaagacttagaagcagttacagaagtatttaattcttttggaaatactgaggtagtaccagagtatcttatagaagctgtaattggtgcaagtggttctgcaccagcatatgtatttttatttatagaagctatagcagatgcagcagtaattgcaggaatgccaagaccacaagcatataagtttgcatcacaggctgttatgggttctgcaaaaatggtacttgagacaggaaaacatcctggtgaattaaaagatatggtatgttcacctggtggaactactatagaagcagttaaagtacttgaagaagaaggttttagagcttctgtgataaaagcaatatgtgcatgtatagaaaaatctaaaaaaatgagtgagtaataaaaatttattgtaaataaagagaattgccttttatagaaaatttccattttaggcaattctttttatttgtttaatttctaaaataagcctgaaagccaattttttattttttcaaagaaaccaactgagtcattattatttgattgattttctgaattatttgttgtgttgttttcatttgtttgagaactatcgttattttcattattacttgaagtatcattttttgagctatttgtatcactatcattgttagaattagtattattttgtggatttatttgaacaccttctgtagaatttattacagcatcagagccaagagactcatcattagtgttatttaagattcccaaatcttttttatctccgcctgagaataaaccagagaaccagtctcctattccactaaaccatccaccaatagtatctagtataccagaacccttaacactttcacctaatttctttaattgttcatttacattatctgatacattatctagtgtatttttcatgctattgtaatcataattttggtcagctatttttttcattacacctttaatttgttctttttgttctggtgtaatagtaatattgtaattatttacaacattatttattgtatttgctatttgattggtatcttttgtaccattctttacaatttctgtttttatatcattcattacacctgttgctttttcttgccctatatcatctcctaagtcacctgtaactaccaattcttcagaagcaatttctttcttagtttcatcaagtttctttcctgaagcatcctcaaatgctttcatgattcctgtcaatgctccagtaccacttacaggatatggagcagcagcaataacatttgcatcttcaagaccagctgttgtaagggttgaagcaatcattgaactagttacccaagttaagtttgctgttttaacattaattccatttccttttttagtaggttcaacgtatgagcaagagatagtaacttttccaagttgaccctctgttgcaacaccttgtaaatactgtctttcttctgcatttgttacatctaaaactaagacttggtctttttttactccaaagtaattaagcatttgctgcttttgagactctgataagttagctccaagtgtaactacatttgtaccatctgcataagaaaggttcatactcccaagtacaagcatagtagacacaacaatagaactaatttgttttttaaacttcataatattcctcctagatttaacatacattacattttcaatctatttttttattaatatattgaataaaaatatgtgctacatttctattatactaaatataaactattttttaaatcaatgcgattacaactttgtaataaaaaagggaatataaggaagataataaaaaaataatttttgtaagagattgaaaaaacaattaatgtagtatactataatatagaaatgattatgataatgttatagaatcggaaggagaaaaataaatgtcaaaagaattagtaaaagatagagtaataaaatatttaatagaagatttattagtccctcaagatatgattgatacaaatgttgagttggcagaatttgaagaaggtgcagaaggagttttagatattgttgtaaatgttaaagatgaagaagattattatgcacctgtaatgatagtgcaatgtttagatgaagatgtagagttagaaggagaagttttacaaaaacaaatagaatttttagaagaagtggataatataactatgtcaggtagattggttttaactaatggggatgctatgatgtacgctgattggagaggggaagaatacgatactgaggcagctcttccaacttatgatataatggtaaaagagtttcatgaaatggaacaacaggcaaaagatttagaagaacatcatcaccatgataaaaattgtggatgtggatgtaatcatcatcatgaaaattaaatattgagcatatatataaaaaaagactgtttagtaaacagtctttttttagacatatatcattcaaaaaactaagaatataacaacatataataaaataaattatatatataaggaggatattgcggttagaagtagaataatattataggtatagtttttataaatttgtatacataatatacaaaacaattcatttaaagaatgggatattatgtaattgtagattatgtaggtttaaattatttatttttgttttagcaaattctatgaatagaaggggtttgattatggatactaaaaaagaaaataattatgaaaattatatttgtgtgggttcatcaaatgtatcaaatgcgatgaaaatgtatttaaaggaaatagaggaatacaaaatgttgtcagcaggagaagaggtagagctggctaaggaaataatcaactcatcttcagtagcaaaagaaaaatttataaattcaaattataggttggtagtgagcatagcaaagagatataaaagagatagtattgatatgttggatttaattcaagcaggaaatataggacttataaaagctgtagaaaagtacgattataaaaaaggatacaaatttagcacttatgcaacttggtggataaaacaaagtataacaagatatatcgacgattgcgaaaatactattaggatacctatacatcttcatcagagaataaattttgtaaagaaaaagaaacaagaacttttaaatgtattattaagagagccaactatagatgagattgcagatgcatgtggcttagaagttgacaaagtgttggaattattaagaagagataaaaatgttgtatctttggatactccattaaaagaagatgaggatagtagtttagttgaatttataccatcagatgctgattttaaagatgttgtaatacacgaagttgaacagcataatttaaaagaaaagatagaagaactacttacaggtcttggtgagcaagaacagcaagttttaagaatgagatttggaattgatgatgatgaccctaaaacactagaacagattggaaaggtatttggagttaccagagaacgaataagacagatagaagctaaagcaataagaaaattaagacatccaagtaagttaaaacaattaaagcatttttattaatatttttagacacattatatatgagagtatgagaaagcatgttaatctctacttaggaattatttttttataaaatctgtttatgaacagcacacttgtattttataggtgtgctgttattttatttatttaataaagtacataatagtttagtaaaatttctcaatatggacaaaatatgttagaatatagtttaaaaagataataaaatctgttttttacttttaaagttatcgggtagcaactccatttctttgaatataattgaagctatacaatttatataggaaagatgtaaaacttattggagaaataaaaaaatatgaagaataatgtagtttgtgatatattaagaaataggtgttaattatattttgatagggctaagcaaggcaaattagttgatagaattatatctaatgagccaaattttacttgattaaaaagaggtatgttagaagtggagtgataaaatgagcaaggtagctaaagcaactttttatttgatgatagttactataatctctaagattcttggaatgggtagagaattagtattatcatcaatttatggtacaggcttatatacagagagttatttaacagctatgaatataccaaatattatatttgcagcaataggtactgctatagttactacttttattccaatgtatcaagatataagtagtaaacaaggtgaaaagcaagcactaaagtttttaaacaatgttttaaatataatagttggtatatgcatagttgtagctatattaggagttattttctcaaagcaacttgtaagtatatttgctataggatttgaaggagagaggtttttacttaccgtaaaatttactaaaatattgataacaggaataatattcataggtattacgagtgttatgtcagcatttctgcaaattaaagagaactttattgtagttggatttgggagtataccctataatatagtaataattatttcaataatgttaagtaccgtatttggaccatacatacttccaattggtgctgtggttgctatggtagttcaactgctcttttacatgttttttgttaaaaaaacgaactacaaatacttatactacttaaactttaaagatgatagccttattaaattactagcattactttcaccagtatttataggtgttgctgttaatcaagtgaactcattggtagatacaactttagcctcaacattagttaaaggaagcattccagcacttacttattcagatagattaaatggttttgttacagggacatttacagcttcaatagtatctgttatgtatcctatgttatctaagttaagtgcagaaaataatcaaaagaagtttactagttcagttaaatctagtataaatatgataataatttctatgattcctatttcagttgcttctattttttttgcaactcctgttgttagaatcatttttgaaagaggtgcttttgatgcgagggcaacccaaatgacagcaactgccttaattttttatgcagttggtatgactgcatttggattaagagatattttgggaaaggttttttattcattacaagacacaaaaacacctatggtaaatgggattatatctgtaggggtaaatatagtattggacttagttttaataaaaccaatggctcatggtggtcttgctcttgcaactagttcatcatcaattgcatgtatattgttactcttcttgaacctaaagagaaaagttggatattttggacaagataaaataataaaagcaactttgaaatcggtagttgcatctttaattatgggtgttttatcatactttacgtataaatttatatttggaattttgggagtaggaacatttaatgagtttgtatcactagctatttcagttatagttggaggtggaatttatacactactaatgactatttttaaagttgaagaggttgatatgatactgaatattgcaaagagaaaattgcatttaaaaaagtaatctaattatattaattataaatttaggaggattttatgaaacatatattaaaaacagtagaccatactattttaaaagctacaactacatgggaagatattaaaattttatgtgatgaagctgtagatatgagtgtagcatcagtttgcataccaccatcatatgtgaaaagagcatcagaatatctaaaaggtaaaataaagatatgtacagtgatagggttccctttgggatatcaaactactgctacaaaagtatttgaagcaaaagatgctattgaaaatggagcagatgaagttgatatggttgtaaacatttcagatataaaaaataaagattatgataatataggaaaagaaataaaagaaataaaaaaagctataggagataaagtattaaaagtcattatagagacatgttatttagatgaagatgaaaaaataaaaatgtgtgaaatagtaacaatgtcaggttcagattttataaaaacatctactggaatgggaacaggtggagctactttagaagacataaagcttatgaaagagcatgttggaaaaaatgtaaaaataaaagctgcagggggagttaaatcaatttctgatgcagaaaaatttatagaggcaggagcagaaaggttaggaactagctcaatatgtaaaatattaaaaaatgaagatacaacagattattaaagtttttaacttatgggataggattacaaaaatcaaaatttaattataaatataaagaacaaaaaacagagggaattttccctctgttttttatttagtattgacagaaaatatttttcaagatattataagttatatagttaattagttgagtaactaactaatggagaaaggaggaacctatgaaattagtattaaataatgaagaacctatatttattcagatagcacgagcaattgaagatgagatactatcaaatggaataaaagaagaagaacaggttccatcaacaacagagctttcaaagctttataaaattaatccagctacagtattaaaaggtataaatatattggttgataaaaatattttatataagaagagggggatagggatgtttgtatcagatggtgcaaaaactattataaaagaagctagaaaagaaaattttaaacataattttgtaaaaaacctacttcaagaagctaacaaattagaaataaatagagaagaattggttgatattataattaatttcaaggaggattaatatatgaggagttctattaagatagaaaatttatctcacagttttaagaagcaaaatatttttaataatatgtctctaaactttgaaaaaaataagatatatggtttattaggtaagaatggagctggaaaaacaacattattaaatataatggtaaatcagttaattcaaaatgaaggtgagatagaaatattaggaaagaacccaaaagaagatataaaagttttggaagaagtttgtatcgtcagggaaaaagaattttatagtccagattttaaagtaggtcagatatttgaattttcttctagtttttataaaagttatgataaaggcttagaagaagaattatgcaaatattttgatttaaatactaaaaaaaagtataaacaactgtcaagaggtatgaaaactatactttcaaatataataggtatttgttctaattcagctatcaccatatttgatgagccaacaattggtttggatgcagtaaatagacaagagttttataacataattttagatagttatataaaaaatccaaggacaataataatatcaactcatttgattgatgaaatagatgatttactggagcatgtaataatattaaatgagggaaaaattattatagatgaagaaattgatgtcataaaacaaaaagctcattatattactggaaataaagaagagttagaaaaattagaatgtataaaaaatataaaacctaaaaaggcatttggaaatgcagttgcttatttttactatggtgattttagtgaaaatgatgaaaaaatacttaaaaattcaaatattgatgtaggatacatagggctacaagatatgtttgttaacatgactaagaaggaggaattgtaattgaatgaattaaagccatatataaaattttttaataaaaatactaaattgtatataattatatttatgattgtgggaattgttatgaatattttgccagtgtttatcctcaagatttttggagaagcatctaaaactaatttatccacgattgtgaatcctattttaacatatataactatactgctatttgtgtatggagtaaatatagcaaataaagacttttcaggagctttaagtataagagcagatcgaaaaagttgtataaaagctattgtcatagatttaattattttaagctttgtgatttctattttaggtatagttttgatttttttatcgaagttatttatagaaattataacaggttacagtatagaactatcagttttactaaagagagatatgatttggacatctatatcagcactgatagatccttcaacatcaagtatgccactaacttatttaaattattttgtacaaatatgtataaatgaaatatgtataggttttataggagtattacttggagcttttacatatagagttagaaaagttactagtattactatattgataggattaccgatattaatggtaatttatatagttaattttgcaactaaaaatatgcataaaatgctattgtatttagaaaaaattatttattcatttcagaatccttttattttatttggaacaaaggtaggaattatagttatttgcataatatttataattttattacttagaaaagcaccaattaaagagtatgcaaatgacttattataactaaaataaaacctgcttaaaaatcaaatttgtaaatttgtattttaaagcaggtttattagttttaataaatgttgattttaagcattaatttttaatacttatatctacctttatatttttttataaatagaatagatataaatatggttataacctcagcaaatggaactgtaagccataatccagtcatgtttaacataggaggaagaattatgattcctatgattataaaaacaaaggcacgactaaaagatataatagctgaaatttttccattgtgaaatgctgtaaaaaatcctgatgcaaatatatttataccaacaaacaaaaaagcaaatgcaaatatttttaatccttgtaaggctagtttaaatactgtgttatctggacttacaaaaaccctaacaataaatggtgcaaatactaaagcaataataaacactaaaagagaagaaacaaatataaattttagagaatgtttaaatgtttcttttaatttatcactgttttcagcaccaaaattatagcttattaatggagacactccagcagcgaatcctagatagactgatgtcattaaaaaatgagcatacaatactatagtaagagcagcaagtccattttctcctgctaattttaaagctactacattaaataagaatgttgtaattcctgtagataattctgtaaccatttcagaagaaccgtttatcatagtatctcttataagtctaaaatcggtttttggttttcttaatttgagtgtagatttattagataagaagtaaataatacctaaaacacaagttaaaataatacctatagcagttgcaactgcagctcctaaaagacccattccaaaatatttaataaatacataatccaatattatatttgttacaccaccaatgactgatagaaataaactaaatttagaatttccatcagttcttgcaaagtagttaaatataaattttaaaatataaaatggtgtacataaaatcataactttaccataagttatacaatatggtaataacttatctgttgcaccaagcaaaatagatatttctttgataaagaaatatgagattactgtgaatgaaatcccaacaatcaatgaaaacaaaactataaaagaaaatgtagagttggcttcatcctgtctattttcacccatacgtatagaaacgatagcacctccacccgttgccatcattattccaaatccacaaacaaggttaattataggtagtacaatatttatactagcaagagcatcggaaccaactaatgttgatacaaagatgccatctattattgtgtacaaagatataaatatcatggatataattgcaggagaaacaaattttagaaattcaaaagtagtgaattttcttgtaaataaattttccataaattttacctccttttattactctctatctataataagctatatagtaactatatgtcaagaaaaattttatttatacgataaacagcttaaaatcaacaaaaaatcatattaagataaattagtataatgctaattaataaacttatattagtaaaaataggtatattgcattagtaaggaataactgtttcttaagaaaatttttagaaatatatgtatataatcttaagctttataagttattatatatatataagattttgtctgaaaagaaatagattttaactatatatcttttatacaacttattttaaattagttcttatttattaaatataatgttttaatatagaagagaagttatttttatttcaagcagccattttatatactatataaattctaggagtgtgagatatgaaaaagttttttatggtagttttaggatgtatttttgttttaggtgtgatttctggatgtagcaaaaaagaatctaagccagtagaaaaaaacaagagtaatagtgaatggtttagtaatttagatacggaggatgttgatggaaataaggtaacaaaagagatattttcaaataaagaacttactcttattaatgtctggactacttggtgtggaccatgtgtgggtgaaatgccagagcttgaagcattatcaaaagaatatgagagtaataattccaatgtagctataaagggattagttgtagaagttgataaaactgatatgagaactggtctttcaaatgaagagaaaaatttagttaaaaacattatgaaaaagtcagatgcaacttaccaacaattgactgtatctgaagaacttaaaaaaactgattttaaaagagttatggagtttccaacaacttattttgtagacaagaaaggaaactttgtgggtgagaaggttgtaggtgcaaatagtaaggaagagtggaaaaaaattatagatgaaagactaaaaatggtaaaagccaatgagtaactttattaaagataataaaaaaggcatttctattattgcaattagtattatatttattgcattaggtacatatcgtggagaaacaaatacagtattaactaaagcaattatgatttgtcttgagtgtattggtattggttaggagaagaggaatgaagttattatctaaggtaaataataatataagacttattattcaagttgcatttacagcattaacaaatggatatgtaaatggatttttagaaggaactatatatggaggagaaagtaaaaaattatgtgtacctggattgaattgttattcatgtccaggtgcacttggagcatgtccaataggttcattacaagcagttttatcaagcagagagtataaattctcattttatgttgttggttttttaatggcatttggtgctttttttggcagatttgtttgtggttggctttgtccctttggacttgtacaagatttactacataaagtaccctttccagtaaagataaaaaaagtttatggtgataaatatctaaaatatctaaagtatatagtcttaataatgtttgtaattattttgccagttgctattgtaaatgtagcagggggtggaaatccttggttttgtaaatggatttgcccttcaggaacacttttgggaggaataccacttattttaggaaatgagaatttaagagaatcaataggatttttatttagctggaagttaagtattttgctattgatattattgatgtcaatcattacttataggccattttgcaagtatatatgccctttaggagcaatctatggtttttttaatcctatttcaatatatagatttaaaattgataaagataaatgtacaaattgtacagcatgtcaaacaaaatgtaagcttgatataccaatatataaagatgtaaatagtccagactgtattaggtgtggtgaatgtataaaagtttgtccacaaaatgcaattactacaactttttcaaaagataaaaaagagaataatatttgtgcaaaaaagtatagggggatataatttaatgaagaaatttattctatgtattataatgtttgcaatatcagtactggtgttagctggttgtactaatgataataagataaaaaatgaagtggatagtatgtttaattcaataaaaacacaagatgcagatactgttgataagtatttcccaaaatcagggttaggtaatcttatatacgaagataaagaaggatttaaaatgtattctaaaaatatgacttgggaaatttcagatataaagaataataaggataaagtgactgtagatttaaaaattaacaatactgatatggtttctattttaaaaaagaatcctcctaaactaggagaaatgatgccaaatccaactatgaaagatattgattctgcaaagaaaaaagaatttaatattacattagagcttgttaaatctggtgataattatgtttgtaaagttaatcaagaatctgcaatgaaattattaaatgtgattacaggaggtggtatagattatctagctgactataataaagattattataaacagcttgatgaagaacaaaaaaattatgaaaataaaaatagttagtaatatatatgaaaattggagcaattaataatatagaaacacaaattaaaagaatataaaagtggtagaatgaaagtcttgtagaagcttttattctaccacttttagaaataagttatttcatatgattttattatttatagagctatttacatgtatgtatattttatagaccaagattttctcctaccaatattacctttattttttttgctggacgactgattcttgtagtaaccatgtatgcacaaatgctttcaggacttgtgcaatctatacaacttccattaatatagcatggtgtattgacatcttgaaaacgctgaacaactgctggagatgcaattgttctagttctttgtattgcatcatcaatgttttttacaattttattcataccagctacaactataacattttttggaccaaatatcattgcagctacacgattgccatttccatcaatattaaagagttgtccatcttcactaattgcattgctactcatcaaaaaagtatcgcatagaagtgcttgacgcataatttcagttctttcttctggagtttttgctaaatctctatcaataactttaaatcctttctctctaacagcagtttgtacgcccatttctttaagtgtttcagatcctccccatgatactacatgattttgaggaattaaatctaaaatttgttgcaaagcttcatttctagttttacagtaataagcatcaaaataacgttttttgaatgctgttacaatatgaggacctagcttgtcatatcgtttctctaatggtgtttgtcttatcatactaaaatcactcccatatttaaattttaatattgtaactattatgctaattaagattatacgatatattattgtataaggttaattttataagtaatcttttcctaagattacgaaaatagttacaatatagttataacataaatatgcgattagtataagatttactattagtttttaacaaataactgaataaagaaatacttataaaacataatcactaatactttttatttaatataaaataaagttgtgggttatagatgatgattattttattttatgaataacttgtttaaattttataagtttataaaaaataaaggtacagttaactgtacctttattttatctaaatatgcaaagattattttaaaagtaatttttaattacatgtttttataactctccaatattctaatataatgatttgcctctcttaaaacatggtctgctaaaagtggtaatattatagattttatcttacactgttctattcctgatgctcctgcttctttaaaatctttaaactcaacagtttcatttagagtttcttctgtaatgttcttgatattagaatcagtcatttcgtttgttttttcaattaattcattaaattttatagcaaaatcatttgaagtatttattagttcaccttctgaggggtctagtaatcctctcataaacagagcatgttccatcataatatggtcccagaataattctatttctttagcgttttttgactcaatatctattttattttcaaggtcaactacataagaacgatataaatttgcttcatgtattatatgttcaagaagtagagggtagtttgatgtaaatatagtacatgatagtacaccatctaagactctttctttaaaattaataagcccatcaagtaatcttattgcatcagagttaagttgagctacatagttcactaagtcttgaccaacttgtgggtttacaccactttgtagatttaattctcttgtagtgatgtctttgtttatttctatccctgtaaactcttctgttttttgttctgcaactgatgtgagagtagttacaagctcttctgaatataatatatcaggtctaattataccattactagcactaacagtgtatgataataaatcttcaaattgctttttatagtggtcagcttccatagcaagattataatttttatttgtgaatcctgcttctaaaaaaagagcatgctctttcataattcttgaaaaaaataaatgtaattctagtgataaaataacatatttttgattatctatcataatttcctccctttagaaagtatcctatttataatactttattcgtaatatttaaatttatgtatattataaataaattaactaaattcaattgctactaatatcaacagtttttattaagttatgggcgaaaaaattatcttactgtgtttcttattagatatagatataatgatttaaggtacttgttggctattatttattaagagcacaagtaatactagaaatttttatgagaattatgtaatttataagtattattttgatacaaaacaaatattttttgtgaaacaagaacttttatagcaaaaaatgaataaatatgaagcaatcataattttataccacaacaattattaattctaatagctgcacttaatgttttaggtatgggatttaaaaagtataaaaaattaagtgataaatatattccattatattgcttgtgcttggagtagtattttctgtatggatgttaggatttaatccaacttctattttacaggggattctatgctggggtgtttcaattggattaaattaagtatgcaaacaatttcaagacaatgataaataattggatgtgtgataggaatatcaacaaaaaacattattaaaaagaattattttatttataaaataaaacaagtaataagaataaataaggagcaactaaaatgatttaaatatactagaattaaaaagagaatgtaaagttgtctagtaatggaggtaaaatattttaaacgataagctatgaaattgatatattaaaatgggtaagaagaatattatataggattcttcttacccattttaataaatttaattttatgccaaaccacattcgcatagtagaatcatcactctatggagacataactctacaacatcttctccatattttttaataaaatcaccaatttgagtttctatgaatgaatagtattcttttaaactagcaatatatgcagtcattatatgaacacattcatcaatcttatctttaaacacaactaatccccctaaaaaacgaaaaataaaaatattcagtaaatagcagatattatttcactcataaatctatatagtatgatatattgcttagatatattttacaagtggatatgtaaaactggttattataatcgcaaaactggataaactttcattcttaaaagaaaatttatccagtttaaagtttaattatgaatatttgagttagtagatatttaatataaattaatataagtgtaataagaatatacttatataattataattaatcatacttttaaggaatttaattttaaaattttagttattgtaatctattattttctaagcaatttattattttttaggtaatttattactttttaggtattctattattttttagatatattatataaaattatatactatatatttaactcaaatgtaaaattatcaattagtctggtttttcctataaacacagcaattgccacaaggatagaatgttctatttgcttaacaggttgtaatgtctcactatctacaatttcaacatagtctatttttgctaagtgttcagaatttattttagctgttattaattcttttatattctttggatttagattgccttttactaattcttcttttgctaaacttaagctcttatttaatattagagcagattttcgttcttcctcagagagatatgtatttctcgaactttttgctaatccatcattttcacgaattataggacagcctattatttctgtatttatgtttaaatccttgaccattcttttaattacagccaattgttgggcatccttctctccaaaataagctttatcaggtgttactatatttagaaactttgaaacaactaggcagacacctccaaaatgaacaggtcttttagctccacaaagaaaatctgtaagtccagaaacattaatggtagtacaattaccttttaaatacatttcttctggtgatgggttaaagactactgttgctccactatccatacaatatttaaaatctttatctatatctcttggatagctattaaaatcttcatttggtccaaattgagttggatttacaaatacactcactactactttatcattttcttttacagctttttttataagactttggtgtccttcatgtaaaaatcccattgttgtaacaagccctatagaatagccatgttttctccaatctttgattatatttcttagtaatttaatttcttttacaagcattttgtaccatccttaatattagtataatttttctaactcagattcatttattgaaaagctgtgtttttcttgtggaaatgcacctgtattaacttctaggatgtaatttttaattgaatctttcattatatctcctatatttgcatactgctttacaaacttaggaacaaaatctccaaacactcccaacatatcttgataaactaaaatttgtccatcgcagttaattcctgcccctatacctattgtaggaattgaaatagaattagttaccatatcagctattttcgtaggaactccttcaaggacaatagagaatgcacctgctttttctattaatttagcatcttcaataagttgtcttgctgtttcactggtatttccttgaaccttaaacccaccaaatgaatttactgattgaggagttaatcctaaatgccccattacaggtatctgagcatttacaatgctttctatttgctttataacgtttgagccaccttctaactttacagcatgagctcctccttcttttataagtctaccagcgtttttaactgcatcttctatagaaacatggtaagatagaaaaggcatatcacttacgattaaggcattttttgcaccattttttacagcttttgtatgatatataatttcgtctatagtaacagatagagtgttttcttcaccttttatgaccattcctaatgaatcgcctattaaaataccatttatatcacattcatccattatttttgcaattgagtagtcataagcagtaagcatagatagtttttttccttcatatttagcgttcttaaaagtctgtatggtatttttcatcgttttttcctcctaaaagtttgtaaatttctttgtatttttcagatttacttattaaattttcgattgcattttctatagtaatattttttgtaccttttaatgaattgtcatttcctaaggcaattatttttagtaggtttaaggatagtattttgtagatatcctcatcttttttattcaatacagatagatgtttccttattggtgttatatctccacgagaaacaggaccagtaagagctttagtaaagccattatcaagtatattttctatatttttttttactaaaggactgatagcttttaaagattcctcttcagataaacctaatttaataaagtaacttactcctatatctagtaaagataatactaaatttgaaactaaaacattagctagatgataagtggatgaagtatccttatctcttataaaaaattggtttcccaaaccatctatgaaattttgaataactaaatcatcttgttcattatcaccttctatggaaaaacaaatgtctttcattttttttatgttggtatttttattggaaaatgcaaatataggatggatagaataaattaatgcacctgctttttttgaacagaacaatatactagattttaaagagccacttgtgtggcaaatgtatttatgttttaaattaaatttggaaagttttttgtctataatttcaatagaatcatctgatgttgtaataaataatatatcgttttcataaattatatctctcaaattgctgtaaatctttgtttttgttaaatttattgattctaataaagataattgattccttccataaaagcctgaaacacaataaccttttgataaaaaataatttgccaaagatgttccaacttttccagaaccaataaagcctattttaatagtatcacctccactttgtgatacaacatcttaatttctaatctcattcctgaggatatgagttacataagacaaaataattaaaaacatttaaagtatagttcttataacaagataccatccataaatatcttaccattttcataaaaaattgacaattaattctataaaatttatataataaaatatcagtaaaaaaattatgatatttataaaatataagttttttgttttactatatatattaaaagtgattaagtctattagaaaaattatgatgtttttagaaattaatgctttttaacttcaatagtatcaataatactgattttttataaaaatttaaaacaataataaaatatataatttatttttgtggacaatttgtcaagattagtaccaagttaaaatttaatataagagagagatgtattatgtaatattaattttttttaaattggtaatactatattgctgtatttttttttatcaattataatttaaaatatgaaataataaactttctaattaaattaaggtatttagtgtgtatgtataagttataagtaaatcttctaaaaagaataattttaacagtgttgttataaagagcagtaactatggaggagataagtatatgaacaaacgtaattttgaagttatattaaatcaactacagattaatatatatgttacaaatattcatactaatgaaattatttttatgaacaagaaaatgaaagaagaatataatattttagatccagaaggaaaagtttgctggcaagtattatatcctgagcaaaattctacttgtagtttttgtaaagttttagaactattaaagaatgataaaaaaggagtattaataaagtggtatgaaaaatgtaataagttaaatcgtgtttttgaaaattatgatagtttaattacatggcaagatggcacagttgttcatatgcatcaatcaatagatattgcaaactcaacaatcttaaataaaccaattaagattaatgaatttaatgaaatatcaaatactaaagaaggaaaaggagtttttaatttttcaagagacaattttgattataattctacattgctttatgatgctttgattagaggtacagatgaatatatatacatttgtaatatgaaaacaggcgtatttcgatattcaccatcacaagttgaattatttgacttaccaggagaaattgttgaaaatccgcttatttactggaaaaaaattgtacatccagaagactggaatcgtttttataagtcaaacactgaaataggtaaaaaccagatggattatcatacagtggaatttagggctaaaaatcgtagtggagaatatatatggttaagatgtagaggacaactaatgcgtgatgaatttggagaaccaagtatttttgcaggaataatgacgcaattaggtaaacaaaataagattgattcattgacacagttactgaattatcatgaatttatgagtgtatttgaagataaaatttcaaatcctatgattgaaaaattatgcatagtattattaaatattgacgattttaaaaatgttaatgagatgtatgatagggattttggagataatataataaaaacactagcacagtctatacaatctattttaccagataatgctgaactttataaacttgatggggacgaaatgggtattcttgttgataatgttgaagaaaatgaaattctaactctatataatcaaatacagaatatgattatacaccttcaactatggagaaaatatggattaaatataacaatttctgctggttgtgtaatatatccaaaacatggagatacagtaaaagaactttataaatgcgctagttactctttacaatatgcgaaagagcatggtaaaaacaggcttgtttttttctcccaagaaatattaaaaaataaaatgtattcattagaaatgatgcgggatttaaaggcatcaattaatgatgattttaggggatttagtcttcgattccagccacaagtagatacacaaagtcataaaataataggtgtagaagttcttttaaggtggactaatgacaaatgcaaagcaatttctcctttggaatttattccaatattagaagaaaatgatatgataaatattgtaggggcttgggtgcttcgaatggcattacgtacttttaggaaatggattgattactatcctttttttaaagtgagtgtaaacgtttcagctgttcaaatattagaagacacatttattgaagatatagtaaaaattatagatgatgaaaattttccttatcaaaatcttgttttagaattgacagaaagtcatacagtacaaaatatgagtattttacagtttaaatttaaggctttacaagatttaggaatttatattgctatggatgattttggtactggatactcgtctctagaagttttaaaattttctccaatagatatagtgaaaattgatagagtatttgttaaagatatattaaagagtaagtttgatgctacatttatacattttattgttgcaatttgtcatgatgtaggaataaaagtatgtttagaaggtgtagaaacacaagaagagtatgatttagttaaacaaataaagccagattacatacaaggatatttatttggaaaaccgcagacagcaacagaaatctttgaccttttaaagctagataattaattctaatttatcaataatatcactgaaaagctttaaaatcaaaaatacattaaattattatattgaagatatatcaattataaattgcaatataagaaaatagcatttcaagggatgttaaattaggagtagtatatgattaaagtattttaaaaagggataactataataaaaatagatatctatttttagattaaaaataatatatcataaataaaataataagaggtagatacagttttaagggaatacaaaagtttttaattaaactatgcttgttcagatagatatttatttaagaaaaaagactattaaaagcaatatacaagaatgatatattagattgattaaacaagcataaatattatgtaaaaaactttaagttatagaatttaaatccaatgtagatagattacgttttttcttgcttttattatggtataaattggtatcaatattcaaaagtaatatatttatgatataataaaattatagaaattttgcagtgagctatatttgtgataaaatttggcgtaacagttgaaatataaggtgttgagagtgcatgataagcgttatcaattgcactattgctcgttcactgcaaatttaggagagttgtatacgtgtaagtgttgaaaatactaagtttattttggggttttatattaactatatggaatgtaaatctcggagaatttcctaatgtggatttaataggaagtgttttatattaactatatggaatgtaaattttagcaaatttttcgtaaaagtcactattttcaatggttttatattaactatatggaatgtaaatacatataaaactttcatcttctgttaattcattaaaacgttttatattaactatatggaatgtaaatccatcttttgttgttttacataaatttatattacttacgttttatactaactatacggaatataaatttttataattttcttttaatgtgttatcttatgattatctagttatattagcatacaaaaatataataaaattacactatattataaaaaccaaaaggtagtatagaaatcctattacctttttattattaattttatcagtgttttattataaatagcttacataattacacattttttctgattaaataatatgatgctattgttataatagatactaatgctaatgatgttattgcagtatctaatcttcttattaataaactcatttctatatattcaagttctattaaatattgataaaatatttctagtttaacagctttttctctatctatatttccatactttaactctaatttatctaaagattttttattacaataattaactttatgtttaattaaatatcttattgtagcacctattacaattttcactctaacaagcataaatataatattccatccaaaagttaagaggggatatcttttttatgagaggaatggataaaatatttataactgacatctaactgatatttaagctttaaaatcaaaaccatattgattttctaaaataataactacttgatttagtaaataataaagaatatagtaactatatagacaacaaaaagaaaaggagtgtataacccttggaaaaacagtattttacaacaggtgaatttgctaaattgtgtggtatatctaagcagacattaattttctatgacaaaataggtattttttctcctgaatataaagataaaaataattatagatattactcagtttatcaatatgatacacttgatatattacaatcattaagagaaataggaatgagtttagaggaaataaaagagtatatacaaaatagaactccccagctttgtgtgaaaatgcttaaagaagaagaaaaaaagataagagaaaaaataaaaaaactaagaaagataagctctaagatgcaaaatagaataaatataacagttgaaggaatttctaaaatgaatagtgaagaaatttatatatccaaaaagtttgaagaatatttagttctatcaagcgatttgagtaatatgagtaatagtgattttatgatggaattaatagatttcaccaattattgtaaatcgaaaaatttgtatcaaggatatgagttgggagtaatagtaagtaatgaaaatataaaaaatggggactatttaagtatatcaagtttttatttgaagatagataaaaaaataaaggataaaaagctatatgtaaagccagaaggaatgtatgcttgcataaaacatattggaaaatatgaggattcatataaatcttacgaaaaattgaaaaaatatatatatgaaaatgaatataaaattattggaaattcgtatgaggagagtatacttgactttttttgtgaaagtaatgaagataattatatgactgaaatttcaattcaagtatccagataagaattaaaatagagatatattcaaatgttaagtaattttacttatcattgaatatatctctatgctttataataaagtatataaatttttaaatagtttctctaatatatgtctaatgtcagttaatactaattatataaataaattgtaaactgtagttgttaaaaaacaaacaacaaaagcaagtatagtaggcattaagaatcctaaggcagtccattttaaactaccagtttctttttttattgttaaaagtgttgttgcacaaggccaatgcagtaaactgaacagcataacatttaaagctgtcaaataagtccatccatgttctctaagaacttgacctaaagcactaaagctatctaattctatcatagaaccagttgctaggtaagccattaaaagtataggtacaactatctcatttgctgggaatccaagaataaaagcaagtaatataaaaccatcaagaccaattaatttagctaaagggtctaaaaagtttgcaacatgtgataatatgcttaaatctcctatatatatatttgcaaatatccaagttatgacaccagcaggtatggctaccattacagcccttcctaaaacaaatattgttctatctattatagaggtatataaagttcttcctatttgaggaactctataaggaggaagttctaatgtaaatgtagacggaactccttttaatagcgtcttagaaagagtataagaaaccaacaatgttattataacacctagaattatcagtaaagttatgcaaagtgcagttgctacgcttgatacgaaagagttggttataactgagctaaaaaatattgtagatatagctatcaaagtaggaaaacgaccattacaaggaacaaagttgtttgtaagtatagctataagtctttcccttggagagtcaattatcctacaaccaataactccagctgcattacatccaaatcccatacacatagtcaaacactgttttccatgtgcacaagcttttttaaataggtggtctaagttaaatgcaactcttggcaaatatccaaaatcctcaagtagggtaaataatggaaaaaatattgccataggaggtagcattacagagattacccatgctaatgttctgtataatcctaaaaccaacatatcatttaaccatgatggacaattaatactatttaatatacccgaaatacttggctcaaatccgagtaataaattagataataaagtggatggatagttagccccttctatagtaatccacaatatagtacctaataataagagcattattggaagcccaaatattttagatgttaatattttatctactttttcttctctatcagttgattttttagcaacattagaacaacactcatcactcagttttttagcataatcatagttgattttagtaaactcatctcttattttctgtttatttatattgtctggaatctttttctttacttcattaatagcatctatagaatctttgtctatataattactcatagattcaaatatactttcatcgccatcaataagtctaagtcccaaccatctagaatttatacctggtataatattatccaattctggttgaattgattttaccacattctctatattttcattgtatctaacaggtttattatttaatttgtatttgtcaaaagatacatcatttaaagtatccaatagttcatccataccagagccatttcttgcagcagttaaaataactggaataccaagagaatcctctaaaagttttttatcaatagtaatgcctttttttctagcttcatctattaaattaatacacaaaataactttatctgtaagttccatcacttgaaatactaaatttaaatttctttcaagacatgtagcatcacatactactattactgcatctggattaccaaaacatataaaatcacgagctacaatttcttcttgtgataaggcaaataaagaatatgttcctggtaaatctattaatgcatattcggtatttttatatttaaaattaccacgagctgtagctacagtttttcctggccagtttccagtatgctgtctaagccctgtaagatgattaaatacagtacttttacctgtatttggattgccagccaatgcaattacaaactggtcttccttattgtctatatcaaacatatcttttaaagaactcattttagttgagttatgtgtcaaccccatattaatatcctcctgctagaaatttttaaatgtcagaaactaatattaagctactttcttcttgtcgtagagctatcttactacctctgattttatagacagttaaattattttttggaccttttctaactacatctataacagctcctctagtaagaccaagcgctaacattctttctcttaaattaccactagataatatatcttcaactttgacagtttttttcacttgaatatcgttaaggtttttcatagtagcacctccatgcttgaaatttagcctgggctaatcttcttattctaaactatgcattatattattaccttgttacttttacaaaaaaaagataggcaagatgcctatcatacaaagttgggtataattcttacttttggggaaagtagaatatagaataaaaattaacactttgaatccatataattattgaattttgataataaaaaagtcagaaagcaaaagcctcctgactctatgtaaggtattttcaaatacctaaatatcaattcaatatttaatttatacttaaattatatattaacaatattagcttgtcaacactataatctcattttaatatgttcaatacctgcttcgtcgtatacttctgagatttctttaaaaccacaagataagtaaaggttctttatataagtttgtgctgataaggttatattattttcgtgtaagttaatttttataaaatctatagcacaatccatcatttgttttgctaatccttttcttctatgactagaaagaactaaaactctaccaatggaaacatcattataagagctgtattctttaggaattattctagcataagcacaaatcaatccattttcttttaaaaatatgtgataagagcttttatctatatcatcataatcgtttaatgaaaatatcttctgttcacaagcaaatacctcatatcttgattttgctatttcataaaattcatctaaactcaaatcattaaagtgtttaattttaaacatagtaattacctcctagcatcttaaaaaactgaatattaagatacattataccatttttaacataaatacctttattaaaatttatatttattaaaaatatttttaaaaagtgatatactatattaaaaacaaaactttagttagaaaatttatgatttatggaggcagtgttttgaatactactaaaaaattaactgaagcagctttattgtcatctttattcatagtagtaacaattatagctgtgagtactggatttggatatgctatttacttagattttatagtgccagtatttttttgtataatctgcttgaaatgtgatttaaagtataccattttatctggaattacttcacttttaataatttctctggtacttggaaatctaggaactgctatttgggcaagtcagagtgtattacttggtataatgtgtggctatctaataaataagcctacaatggttatggatgatttagtatatggttcagtatttggggttattgtaatggttttcattgatatatatgcttcaacattaataggttatagttttatgaaagaatttcaaggatatagcaaatggatttattttaatgggtatacaaattttatttattatttaatgatagcattgtttccttttggtatggtgttttgcatatatttattaagtttaattttagggaataaattgcatattttagattctaattctttaaaaaaatttttaatatttaagaattttagaagtttaaaccaatttttatgttgctcaaaaaaagctttttacatatgtgtttcttatctagccatttttgaagttctaaaactgttgaatgttaaagttgattctgtttatttaaaaacaatctttatatcaataacctatataagtgtctattttatcattagagactcatgtatgtcactacaaaactttataatagctaagtttagaaaattattatatgctagaattttatttttgataataattttattgctgttttttatatttgatgtaacagttattagtttaataattataaacgcatttttaaataagaaaataaatataagattgagtcagagtaatatagtcaataaacaaataaatcttttgattgaaaaataaactttgggtattggtaaaaaatataaaaaagtagtataatgtaaaaaaacatgtatataataataaaaaaggttgacaaaatataaaaataataatatattatgagtaagttaagaaaaatttcttgtaattgatgaaataatctgaatatataaatgctatgaagagaagaagtagggctagattttatttaacagagagttccagtttggtgaaatggaataaattgatttagtttgaatacatctcagagcactatctctgaaagataacaaccattaagagatatcggattagtacacgttatagtacacgagtatatgtaattgtactctaagagattaatatcgtgagatattgatgaactaaggtggtaacacgtaagcaatgctttcgtccttttaagaggatgaaagctttttttattataaaaaaaaaattatagattatataaatattttaggaggaatgaaaaatgaaatcgatagacgagcaaatgcgaataattatgaaaggtgtagatgatttaatagatgagaaagagttaagggaaaagcttattaaatcagaaaaagaaggaaagcctatgatagtaaaattgggtctagacccaagtgctccagatatacatttagggcatacagtagttcttagaaagatgaaacaattacaagatttaggtcatcaaatagtaataataattggagattttacaggaaaaattggagacccaactggaaaatctaaagctagaaaagctttaacaacagagcaagttcttgcaaatgcaaaaacttatgaagaacaaattttcaaagttttagataaagaaaaaactattgtaagatttaatagcgagtggttagccaagttaaattttgaagatgtaataaaattagcagcaactattactgttgcgagaatgttagaaagagaagattttaaaaagagatatgaaggacaaatgccaatatcagtacatgagttcttctacccattaatgcaagcatatgactctatagcattagaagctgatatagaacttggtggaactgaccaaagattcaatttactaatgggaagatcattacaaagagaatttggtatggagtctcaaatagtaataatgatgcctttaatagaaggattagatggtaaagaaaaaatgagtaagagtttaggtaactatattggaatagatgaagaagcgggaataatgtaccaaaaatctatggaaattcctgatgaacttataattaaatactacaatttagtgacagatgttcatcctgatgaagttaataaaatagaatctcagttgaaagagggttcagtaaatccaagagatataaagatgaacttagcaagagaaatagtaacattataccatggagaagaatctgctaaagaagctgaagaaagatttaaatctgtattccaaaaaggtcaaatacctgaagatatacaaacaattcaagttaaggaagatggatttgacttaatcgaagtactagtttctaatgagattgttaagagtaagagtgaagttagaagattagcttctcaaggtggagtaaaggtaaatggtgaaaaagtagaggatttaagcactattgtaaaagagagtgaattagttgttcaaataggaaagaaaaaatttgtaaaaatcgagctagtaaaatagagtaaagtaaaagcaagtctattgagtataaaatgtacattcaataaacttgcttttttattatattaaaattttaaattgataaccattgtctttaaaatatgttataatttggtccaatgcatttactgtttcttgttttccataagtatcatgcattaaaagaacaaccatttctttgccttcagaagatttctttgcatgttcaaataattcttgtgcatttttctttttaccttctgcatcagcatttaaagcgttccaatcaattgatgccatgtttttctcttttaagtagtttcctagaggttccatatttttccatgacatatacccgcctgggcatctaactacatttgaggaaaaattctttcctaagacttttttcatagcttcatcagttttgttaagttcatttacgaatgtatcgagatttaggcttctgccaggatatagttttttatagtcatgggtataagagtgatgggctattgcatttccttcgtcaaatgttctttttaaaatttcattagctccttttctttcaagagaatcacccttaataaagaaagttcctctaacaccatgtcttttcaagatatctagaacttgtggagtattagtagtagatggtccatcatcaaatgtaagaaagactatcttttctccattgtttgaatagtcgtatttgttaagtttgtcccaaactatttttgcgtcatatccatattcttttacagcttctttttttgcaccaataataggttcatttttttctttttcaattctttctttttctaatctttcagctttaagtctttcttgagtttctttcatttctttttttctagacatgtccgcccatgccatagaaaaaataccaataactattacaacaagtatagtaagtgtaacagttttcttttttcttttttttaccataattacagcattcccccttttgtcgaattgtatcaaaaatatattataattatatcgaagaaagtagaaaaagtaaaccgacaaagttgtaactaagataactaaagtgtaacttatatgacattatttgcataatattaaagtatcatatatattaaaaatatctataaaaaaatttagtataggtaaaaaaatataaaaaatataaaaatttattaaaaaggtgtttacaaaaaatgattaatatattactgttaaatagtggatataaatttgagctcaaaatgtatgtaaatttagatttaaaatactgaaaaaatttactatattaatttatagtaatgcttatagaaaaactctcttgctgtttagggggtttataattttgcaaaaaaataaaaaggagggggctttattgaaaaaatactttggagaaataggactaatatttatagcaattatatggggaagtggctttgtagcaacccaatttgcattagacggtgggcttacacctctacaaatcataactttaagatttttcttggcagctataattatgaatttactgttttttaaacagattcgtgccaatatgggtaaaaaattattaaaagcaggagggattttaggaatatttttatttctagcattcacagtacaaactattggacttatgtacactacaccatctaaaaatgcatttataacagcagctaatgttgtaatagttccgttcataggatttatactttatagaagaaaacttgataaaataggaataataagtagtttggtagctcttataggaattgggatactttctttagaagctgatttctctattaattttggagattttctaacacttatatgttcattcggatttgcatttcatatattctttacaagtgagtttgcaaaagataacaacccaatggcattgacagctattcaatttacagtagcgtttttaatgtctgttgtagttcaaacatttgcaggtcaattaaagatggaagctgaattatctggttatatgggaactatgtatctagctgtatttagtactacaattggatttttatttcagactatatgtcaaaaaagagttgatggaactagaacagctataatattatccacagaggctgtatttggtacaatattttctataataattctaaaggaacttattacagcaaaattgattattggtagtatcttgatatttgttgcaatcataactgcagaaactaaattatcttttttaaagagcaaaaaagtgaaacttaaagattcagaggagtcttcattagaaagtatttaatatgacaactatttcctaattaatcaaataagttatgtattatgtagaaatttgacatcaaaacttggttgatactggtgtttcaaagtgataaaattaattaggaaataaattttatttttagtgtttaagctataaagtctggggtatatatattcttgtagcaagttattaaacttaaaaataaaaatttaattatataaaattgggaggaaattaattatgaaaaaatttgtttgtacagtatgtggatatatacatgaaggagatgctgcaccagcacaatgtccagtatgtaaagttggagctgataaatttgaagaaatgaaaggcgaaatggtttgggctgatgaacatagaataggagtagctcaaggtgtagatgcagaaataatcgaaggattaagagctaactttactggtgagtgtacagaagtaggaatgtatttagcaatgagtagacaagctgatagagaaggttatccagaagtagctgaagcatataagagaatagcttttgaagaggctgaacatgctgctaaatttgcagaacttcttggagaagttgtagttgcagatacaaaagaaaacttaagagttagagttgatgctgagtatggtgcaactgatggaaaattaaaattagctaagagagctaaagaattaggattagatgctatacatgatacagtacatgaaatgtgtaaagacgaagctagacatggtaaagcattcttaggattattaaacagacattttggaaaataataattaaaacatagattaaaaggagaaactttggtttctccttttttaaattatacaaataaactgttgtgatagaaggatggagataatatgaagtcggtatctgttaggagttgtaaaacttacaattatgaagaagtaaagttatctattgaaaaaaatttagaggatattggtggtatagataagtttgttaaaaaaggaagcaaagtacttataaaaccaaatttattaatgaaaaaaaagcctgaagaagctacaactacacatcctatggttgtaaaagttgtatgtgaaaaacttttagagttaaattgtgatattacaatagcagatagccctggtggtccatataatcaaaattctcttaagagcatttataaggcatctggaattgaagaagtagcaaatgaactgggcattaagttaaattatgatgtttcagatgttaagatacatagtaaaaaagcacatgttctaaaatatatggatattattaaaccaatagtagattcagattatataataaatctttgtaaattaaagactcatataatggcaacctttactggtggtacaaaaaacttatatggatgcatagcaggattgaaaaaagcagagatacattatagatttcctacagaagagttgttttgcgaaaatgtacttttagatatttgtgattatataaaaccaacattgacaattatggatggtatagtaggtatggaaggtgatggaccttcagctggtactactcgagaaataggagttttattagcatcacaaaatccatatgctatagatgttgttgcatgtaagattataagtttacttccaaatagagttgctacaattagaggtgctattaagagaggctatatacaagaagatttttcagatattgaaattttaggtgaagatataaaagatttaattataaaaaattacaagattccaaatgtaagtaaggatttaagattgttttccgtaaagctaccaaaatttttaaatgaacctatttcaaagcttataacaccaaagcctgtggtaagatttcaagattgcataaaatgtggaaaatgcaaggaagcttgtcctgcatccactatagagatagggactaaaggtgctattatagacttaagtaaatgtataagatgttactgttgccatgaactttgtcctaaaaaggctattgatgtcaaacgtaattttgtatttaagtatgtaaaataatgtataatattatatgagtctatataaattaaaaatataaaggagaaataatatgattttaattaaaaatggtagagtaatagaccctaaaagtcaaagagatgagaatattgacttaattataaaagaaaataaaatttataaaataggcaagtttgatgaaagtgatgaatatgaaaaaataatagatgctagtggtaatgtagttgctccaggtttagtggatgtacatgtacactttagagaccctgggtttacatataaagaagatatagaaagtggagctaaatctgctgctagaggtggatttacaactgttatatgtatggcaaatactaatcctattgtagataatgaagatacttttaattatgttaaagaaaagtcaaaaaatgcatgtataaatgttttacaagcagcagctataactaaaggttttgaaggtaaagagttagttgatatggaagctcttaaaaaagctggtgtaccagggtttactgatgatggattacctttaatggatagcaatctaattatggaggcaatgattaaggcaaaagagttggatgtaccacttagttttcatgaagaagacccttctttagttggaaatccaggtgtaaatgcaggaaaggtagcttcagaactaggattaaaaggtgcatcaagtgtagcagaagatgttatggtagccagagattgtatgttggcactaaagactggtgctaaagttgatatacaacatataagttcaggtgtatctgttgatatggttaggtttgcaaaatacttaggtgcaaatgtagttgcagaagcttcaccacatcactttacattgactgaggaagatgtattggagtttggaacaaatgcaaaaatgaatccacctctaagaagtaaatgggacagagataagattatagagggattaaatgatggtactattgaaataatagcaacggaccatgcacctcatagtaaagaagaaaaagatagagagtttataaaagctccaagtggaattattgggcttgaaacttctttagctcttggaataacaaatttggtgcataaaaatcatcttagtatgatgcagttaatagaaaaaatgtctataaatcctgcaaagttgtacaatttaaatattggatttatagaagaaggggctgtagcagacattgttatattcaatccagaagaagaatggacagttgaaagctttgtttctaaagctgataattcaccgtttaaaggtaaatctttatatggaaaggttaattatacaatatgtaatggggagattgtatataacgcctaatttaagattatttttttaaggcggagtgtacaatgattgaaagtaaaagattgtatatcagcagaatgagattgattaatcaaaattggaagtattagtttgaacaattagaacataacatcttggtaatttagatatagtaaggaagagaatcctttttatgaaagaacgcactattatatttggaaagattaagttcctaatctatcatatataatagtgcgttatatatttaagtatgttttatataaactaatctaaaaatcgaaaatctttatacaatttctacttataaattgcctttatagggtctagtttagaagctttaaaggctggaatcagaccaaatacaactccagtcaatatagtagctacaattgcataaaataagctatttaagctaggtatagcttcaaaacctatatatttagaaacatagttagtagcagcaaatccaactatagttcctaaaattccaccacatactgttataaaaacagcttcaactaaaaattgaaataatatagacctaggttttgctccaatagcacgtcttataccaatttctctttgtctttccataacagatacatacattatattcattacaccaataccaccaacaaacattgcaactacagttattatagatacatatttgtttacattggaattaatgctttcaagataagctgtctgttcagttgggtctggtgtagtataagaaccattgataccagggtgcatctcatataatttagctataacattgtttgcaacttcatttacattatagcctttagaagaaactaagtctaactggtaaatttcatttgaataagaattttgactcattaaagtgtcaaaagcctttttaggtactagggaagtagtaaattgcatatcttggtaacctccaaagaatcctccagcttggttttgctgagaatcatctaatacccctattatttcaaatatagttccatttatgttgataccatgacctaaggcatcttctggattttcaaaaatttcacttgtactttgtaatgtaagtaaaattacttttcttttttcatcatctaaagaaaaatctctaccacaaattaaatttattttagaatctttttttactggtccaacatcaacatacgtagtttttttatcaaaagatgcttgtgaagagtaaactgaatcaaggttaaacccatctcttgaaggagctattctttctactccttcaacaaatgataattcttctaaatcttttgcattaaagggttttaaaaaaatactcatatcatcagtaagacctgtgttatcggctgattcaaacgaaatagtagttttattagggtttacattgtttacagatttcttaatttctttttgaaatccattacctatagaactaacaagtattactgaagttattcctattataatccagagtaaagctacaaatacacgaagcttgtgaccttttaaattggccaaagaattttttaataaactcatgattacacctccgaagtaaacacaccatctttaagtcgtataaccttagttgcatacttagttaaatcttgatcatgtgtaaccattattatagtcttaccttgtttgttgagccttgttaaaagctccataatttctctgctagtttcactatctaatgccccagtcggttcatcagcaaagattatctgagggtcatttactaggcaacgtgcaatggctacacgctgttgttgaccaccagataattgaagtggtttctgcttaagcttgtccaaaagcccaacagaacttaatttatctttaacaatttcttctctattagatttttttagtgctttattgtaaattagaggcaactctacattttgatatacatttagagtttctattaaattaaattgttggaaaacaaatccaatattaatatttctaaaaacagaacgttcattttcactcaaattagttacatctgttccatcaaatatatatcttccttcatcaaatacatctagaaaacctaagatattaagtaaagtagttttaccactaccagacttacccattatcatgacaaattctccagattcaatttctaaatttaaggattttaaaacatgtaattcatctttccctactttgtaatatttttgaatattttctaatttaattaacatatgtaaattaattcacatccatagtaacttcttctacttttttgtttggagtagtatctccattattagaaccagcagttacgccatcgccttgaactgggtctccttctttcatttctttagtagggtgttttattattatatcgccttgttcaagaccgcctctaactacagcaaaatcatcattttgacttgctacatctacaatttgctttttcaatataccatctaaatccttaaatacatatgagtgtttgttgtctttaagtacacaagatgctggtattttaaagcttgaattagctacttcaagtgatgcttgaagatggaatccatttactaatccttcttgattatcaaatgctatgtttatatcataataagatagtgtattctgctgagctcccatttcagtatttggagtagatggtttatcagatataaaacttattctaccagtaagcttttggtcagttgaaaaaactagtatattgaccatttggtcaatcttcattttaggtaaatcttgttcacttgcttgtcctttcatataaaactctagaccttgaatagtcataaatgaaactggttggtctggatttccagtttggtcattcaagtatactgtgccatcaaaaggagcagtaactctgtcataagcttttttatccagagaagctatctgagagtttaaagcagttatctgtgcatttatagaagcaatagcatctttattttcagcaatatcagaaagtgatattttttgttttttgtattgactaagttgtgattttaaactatctatttctgctattatagttggatttttagcagtaaaaagaaggtctccttgatttactttttgaccatttgtaacattaacatcacttaactcataatctccagatatattgaagtccttagtttgcttaggaacaaccatcccatttataaatattttttcattttcaggaatagtatatgtttcgataaaattttcattagcttgtaattcagtgtttttcgaatcaacataagcaagaactcctagaattaaaagtatgattactgctattcctgcatatattttgaatctcttatttttaaagggattgtttttaaaacctttatttttagacttgaagccactacttccaaaactgctatttctaaagttgttacttttaaaactgttatttctaaatcttttatttttaaatttttttagaaaagacatgtcttcctcctttttataaaaactacttaattatatactgggatgtacatatagaattactataagaagttgaatataagttaatgaaaataaactatcaataataagatactataaatcacatttgaatgtaatagtaaattttgtatattggttgtactctgaatctacatcaattttatgaccaagcttatcacaaagttcttttactaaataaagcccaagacctgtagatttagaattgtttcttccattattacctgtaaatcccttattgaatattcgatttaaatcttccttttttataccacaaccagtatcttccactcttaattgtaaataatttttggttcttttgcaatagatagatatattatctcctaatgaggagtattttagggaattactcaataattgctcgaatatgaagtatagccatttttcatcagataaaaccttaaaattcaaattatttaagtctaaaataattttttttgaaataaaatattttgagtatttttttataatatttctaatgattttttcaatatttacctcttgaattaaaaaatccttatgaaaatcttcgagtcttgataaatataaaattttttcaacggagttttcaattctaaatatttcactatctatgtcatctgaaattttttcattaattaaattttcattttgttcaagaatgagttttattatagctataggtatctttacatcgtgtacccacatatttaaaatctctttgttttcttcaaatttctcgatattattatttattatgttattacattgatattgatgatttttaataatgttcaagtatattttttcttcatttttacatctagctaattctatatcattcatattaattttgaatgtatcattttttatcttatctaaaaatttgttcttcttgatgtagctaataaatagatataaaaataaaaacacaacatttacaactaatatatataaaatagtatcagtcagaaaaacatctacaggagaaaatataataactgatactgtaaaaattaagaaagtaaaattgtatactaaaaaacctagtttatccttgagaaaatctttaaagctcataaattcacctacttagaattgttttaactgattatataacccaatcctctttttgtttctataaaatcttctaaaccaatttcatttaattttgagcgtattctatttacattgacagttaatgtattatcatctacaaaccaatcattatcccataattttttcatgagtttattcctacttactatctgccccttatatttcataagctcatgaagaattttgatttcattttttgttagctcaatagtattatcttcatagtttattgttgcagttgataaatctaaagtaacaccattgtgaataatctgatttgagttattatcaacaaaattataagttcttcttaaaagggcattaactttagctactaagacatctacagaaaaaggtttttgtatataatcatctgcacctaaatttacacccattattacatccatattagaatttcttgaagaaataaaaattataggaacttttgaaatttttcttatttcattacaccaatgaaaaccatcataaaatggaaggtttatgtccaataaaactaattctgggttatagtttttgaactcttctattatattttcaagattttctatttgatgaacatcatgtccccatttagtaagacactttgctatgatatttttcaatgagacgtcatcttcaactaccattattttaaacattcttacctcctaattcaaaatagttatattaacataactatattctacttgataaattaaaatatttctaccttattacctaaaataattatattaatataactatattttacttgataaattatattttaaacataattgcaataaatttgaagaaatataattaatacttacgaaaatgtaaccttaaattaatataattaaatgtttaaaagccattttaatatatataatatatttgtgagaattgataaataactaattgtgatgaaaggtgattattaactatggaagaaatattatctgttgaaaatataaaaaaggagtatggaagaaaaggttcaaaacatgaagctctaaaaggaataactttcaaggtttataaaggagaatttgttggtattatggggtcttccggtgctggtaaatcaacacttttaaatattatttctacaatggatttaccttcatcaggagatatttatataaatggaaagaatactattaaaatgaagcaaaatgaattggcagattttagacgtgataatctaggctttgtatttcaagattctaatcttttggatacacttacaataaaagaaaatataatgttgcctctttctttaaaaaatgaaagagtatcagtaatagaaaatagaataaaagagatttcaaaagaattaaatatagaatctatattagataaatatcctggcgaagtttctggtggacaaaagcaaagaggagctgtatgtagagctatagcaacaaaaccatcattagtacttgcagatgagcctacaggagcattagattctaaatctgctagggatttgttgaattgtctattaaaattaaacaaagacagcaataaaacaatattgatggtaactcatgatgctataagtgcgagtttttgcaatagaatactctttataaaggatggaataatattcacagaaattgtaaagggagaaagtaacagagagttctataataaaatagtaaatacagtttccttaattggaggagttaataaaaatgactttatttagaattgcaatgcaaaatgtaaagaatagtttttttaattatttaatgtactttatttcaattgtatttagtgtatttgtattttttagttttaaatctatagagtataatgaagcgttgagttcacttggagaaaaaactaggatgagtattaatacaagttcaattgtaatagtggtatttgtatttttatttatatattattcaaactcattttttttcaatagacgtaggcgagaagtaggaacttatagtttacttggaatgaggaaaaatcagataggaaaaatatttttatatgaaacttttttgatgggtatagttgcaatactaataggtatatttttaggactgttattttcaaagcttatgactatgatgcttgtaaaattaatgaatgaaatgatagtagtaaatatgaacttaagtataaaggccttagttaagacactagcggtatttttaataatatttatagttattggaataagaaatactatagttatcagaaataagagaattatagagttatttaataaatatccagaaaagtataagtttaaaaaatttataaagttaaaatgtgtacttggtgttttattaatagctatttcttatttaatgtcaattagttattttattgctgaaaatattatgctttcagtttttatattagttacaataatacctggaacttttttatttttttcatcaactatgtatatgattattgatgctgttaagaagagaaaaagtttttattataagggacagaatttaattgcattttctgaacttggatttaaattaaagagcaatagtagtgtattggctgtaatagcaatattaatagctacgagtgtaactatgctagggtttaccatatcactttattacgatatagataggaacataagtgaaaattataaatacagttataccataaatttaggaaattcttatgtaaataacgaaattgacaaattattatataaatataaaaaagataataagataatctttgataaaacaatagaacttatagacaaagatataaatattgaaatgtattataaaaatggaaatagttatatagaagatagaacttctgtagatattattagagaaagtgattttaaaaaattaagacaatatcagaataacaattatgaagaattaacttcaaaggaatctgtgtactatgtttctgattcatacaaaaaaatgttttttaaagactttgagattgaaaaaataaacttgtatattaaagatacaaatgagtatgatataaatctgtttaaggtacaaaaaagcatcttggagccagaaataaattcacaagctacgtttgatttaattgtagtaaaagatgacgtatttaatcagttaaaattacatggaaattctagattaataagattaattgatataaaaaatgaaaaaaaagaactggatttgactttaaaatttaaaaatatagtaagtgaaaatatgaaatttacttatccttttaattttacatcaagtattgaaagttataataacttgataaaattaagtggtctaatgctgtttataggcatatttttgtctgtagtatttcttttatgtacaggtagtataatcttatttaaacaattatcaaatatatatgatgataaggaaagatatattatgttaataaaacttggagcaaataataaagatattgagaaaataatatcaaaacagttaaaaattatatttttaatgccattagttgtaggtacagttcataatttatttgctatgtctatagcacaaaagtttataccaaggtcattacttgtaccaattatcataactctagtcatttattttataggatattttatatattattttttaactttaaaatatgctctaaacatgataaaagaataaattatttttaagtcaaaagaattagatatatgttttgaataaaataacttatttaagtgcagatagaaaatactagaattgagtttaagatatttatttaaagataaaattaaagttaggaaaaagtctatattttatatcattttgtatcagttacattacttgatgttatataataaatctaagcagaatatcaaataaaaaatgacgaggagctgaaatttatgaagtttaatgcctaccaacataaatactcatcaataagaaatgtcgtgtatgctaaaaatggagcagttgcaacatcaacaccattagcatctcaagctggacttgaaatactaaaaaagggtggaaatgctgttgatgcagcagttgcaacagccgccacattagcagtagtagaacctacaagcaatgggattggaggagatgcatatgcccttgtttggatagaggaagaaaaacgattgtatggtttaaattctagtggctttgctccagaaaatatggaattaaaaaattataataatatgaaagaaatgccaaaatatgggtttggagcagtaactgtacctggaatacccgcagcttggtcagaattaaataaaaaatatggtaaacttagcttaatggaatgcttatctccagcgataaactatgcaagagagggatacgtagtatctcctaatgtagctaaggtatggaaaaaatcatatgaactctatgaaaaagaacttattggagaagagttcaaaccatggtttgatacattttctaaagatggtaaagctccagaggctggagatatatttatatgtgaagaacaggcaagtacattagaagagatagcaaatactcaggctgaaagcttttatagaggaagacttgctgataaaatagatgaatattctaaaaaatttaatggggctataagaaagagtgacttagagtgtttttatccaacatgggtagaacctataagtacagaatataagggatataaaatatttgaaatcccaccaaatggtcatggaataacagttttaatggcacttaacatattaaaagaattggaattagaaggaaatatagaaaatgtagaagacatacataaaattatagagagtttaaaattagcttttgcagattctaaaacatatgtaactgatatagagcatatgaaggtaaagattcaggaattactaagccaagagtatgccaaaaaaagaagtttattaattgacaataaagaggctttgtatccaactgcaggagagccatattgtggtggtacagtatacctttgtactgcagataaggatggaaatatggtttcatatatacagagcaattacataaattttggttcaggaattgtgataccaagaactgggattgctttacatagtagaggaaataattttaatttagaccctaaacaccacaatgtagtaaaaccatttaaaaaaccttatcatactataatacctggatttttaggtaaagaagataaagcaataggtccatttggtgtaatgggagcttttatgcaaccacaaggacatattcaagtgttaacaaatatgattgattttggattaaatccacaagaggcgctagatgctccaagatggcagtggataaaaggaaaggaaatagaagttgaaccagagatgccaaagcatataatagattcattaattgaaaagggtcatgaaataaaagtaattcatgatactgtcgacatgggacgaggtcaaataatatttaaaacagaacaggaaagttatatttgtgggacggaatcaagatgtgatggtcatattgcagtttattaatattatcaactaaaatatatataataaatttaaagagtatatgaaataattagtaaaggcgaaagtctacaatgactgacgcctttacaaaatttaagctatcatatgctgattttatatagattatgagccttattcttgaccagttttgatttcattgtcatcataactaatccagtcactaaagctaccaatataaatcttgtgaggtatatccagttctctaagagcaagactgttaacacaagcagatatccctgaaccacaagataaaattacttcatcataattatttaaatctttaaagaatttttttaaaaattctatatctttaagtgagccattttcaaagtcactttttattaaatccttacaaaaataattttttgcacttggtatatgaccagcttttgagtaagcaggttcaactaaaccctggtatctctcattagcacggcaatctattattacagtatcttttttgtataatttagacttaacatattccattggaacaactaaatcattgtttatatttggtctaatttccttacctgtacaacttggtatattcactttctcttccaattctccaccttcctttacgaaagatgttattcccccatctagtacatagacatttttaagccccaaatgttttaattggaaaaataatctgcaagctccatttaaatctccatcatcataagttacaatcgtagtgtcattatcaacacccattttttctaatttttcttttagtattaaagggtcttgtaaaggatttttaccaccatgttcttttgtaggagatgataaatccttgtctatatctaagataaaactgcctttgatatgtccttttttataagaatcaataccataagttctattgataagatcaaatctgcaatctattacaactagattatcatttttttctagttttgatataagttcttttgctgaaataatgtttttcaaagaatgtacctcctatgtttatattatctttattttaatttatattaattattaactttataaactaatattattataatttattacataagtaaataaatctttagaaattgtaaaaattttatataaaaattcaaataattaatgaatattgaaaattttagatatataataaaataagagtatattttatataatatgaaagctggtattgcaatagattaaagccttatacacgtttagtttttaaagaaattagtgttattatgaaaacctaagttaatttattaaataaataattgaataaaaaaattttattatgtatttataaaatttttgttacaaatttggcataatatagtatactttaagtgtgtattaggttaaatctataacaaattagacgtatgatatagacttagtgtttattggcatttacaagaaatttgttaatatcaactatttgtagtttgggcagttataattactataggggggatgtccaatacaaaacaatcaaccaagaactaatattatattataaagagttatagttttgtgtgtttatgtttttaattaaatttaaagtgggaaaaatatatttgttagaatggagaatagcgagatgagtaataaaatagttagtaagagacaattaacagatagtatttatttaatggaaatagaggcacctagagttgcaaaatcttctcaaccaggtcaatttataataattaaaaatgatgaaaagggagagaggattcctcttacaatagctgactatgatagagaaaaaggaacagtaactattgtattccaaacagttggtgcttcaactaaaaagttagcaatgtttgaagaaaacgattttgtaatggattttgtagggccattaggacaagcaagtgaatttatacatgaagatatagaagaattaagaaataaaaagatattatttgtagctggtggagttggttctgctccagtttatccacaagttaaatggtttaaagagcatggattagatgtagatgtaataattggtgcaagaactaaagaattaattatattagaagatgatatgaaaaaagtagctaaaaatgtatatgtatcaacagatgatggtacatatggatttaatggaagagttacagacctattaaaagatttagttgataatcaaggtaaaaaatatgaccaagcaatagtaattggaccaatgataatgatgaaatttatgtgccaattaactaaagaactaaatatacctactatagtaagtttaaatacaataatgatagatggaacaggtatgtgtggtggttgtagagttagtgttggaaatgaaactaagtttgcatgtgtagatggtcctgaatttgatggtcatttagttgattttgatcaagcaatgagaagacagtctatgtacaagactcaagagggaagagctattctaaaacttgaagaaggcgatagtcatcatcatagtaattgtggatgtggaggtaacaaataatggatgctaaaaaagtaaaagtaccagttagagaacaagaacctgctgtgagagcaacaaattttgatgaagtatgcttagggtataataaagaagaagctatggcagaagctaatagatgtttagcttgtaaaaaaccaaaatgtgtgggtggatgtccagtaggaatcgacataccagggtttataacaaaaattaaagaagatgatatagaaggtgctgctaaagtaatagctaagagcagttcattaccagctgtttgtggtagagtatgcccacaagaaagtcaatgtgaaggtgtatgtatacttggaataaaatcagatgctgtatcaataggtaaattagaaagatttgtagcagattggtcaaaagaaaatgacataaatttatctgatacagagcctaagaaaaatcaaaaagtagcagtaataggaagtggtccagcaggtctagcttgtgctggtgatttagctaaaaaaggctatgatgtaacaatctttgaagcaatgcatgagccaggtggagttttaacttacggaatacctgagtttagacttccaaaacaagctgttgttcaacctgaaatagacaatataagaaaattaggtgtaaaaatagaaactaatgtaattgttggtaaaacaattacagtagatgaacttatagaagatgaaggatttgaagctatattcataggttcaggagctggtcttccaatgtttatgaatataccaggggaaaatgcaaatggagtgttttctgcaaatgagtttttaactagagtaaacttaatgaaggcttatagagatgactatgatacacctattagttctggtaaaaaagttgctgtagtaggtggtggaaatgttgctatggacgctgctagaactgcattaagattaggttcagaatcatatatagtttatagaagaagtgaaaaagagcttccagcaagagctgaagaagttcatcatgcaaaagaagaaggcattatatttaatacattaacaaatcctaaggaaattttagtagatgaaaatggatatgttaaaggtatggtttgtataagaatggaattaggagagccagatgattctggaagaagaagacctatagaaatagaaggttctgaatttgtacttgatgtagacacagttataatgtcacttggaacaagcccaaatccactaatatcttctacaacaaagagtcttaatataaataagaagagatgcttaataacagatgaaaatggtcagacttctaaagagggtgtatttgcaggtggagatgctgttactggagcagcaacagtaatatctgcaatgggtgctggtaaaacagcagcagcatcaatagatgaatatttaaaaacaaaagttaatgcttaatttgtaaattaaagagagggtgtctcaaaatgaactttttagttcatgaggcactttttttgtacaaaatcaaatatgttttaatcatttcaacaatgaaaatttcattcctgtagaaagtctaacttttaagtcttagtacaatctctattttgatgtaggcacttttttagatggtttaataatttatcagttattattgtaatatttgatactaagtaacataactttgtctaactatgataaaatagttatacaataaaggtcttgtaaggagtgaataatgtgtggctaataaaatcagatttgtcaaatctaacattaaataatagaaaaataaattgtgtaattaatggtattttaatatgaaaaaaagagaaaaagtatttgatgggctagtttttaagcatatattaatcttattaatactattagttttgattgatttaacaagtaccatcatatatgcaagtaactctatggaaattacttctagaaatatgattgaggcatcaaaaagagaacttgaaaactatttagaagtaaacatatctttattaaaagctcttagtcaagatgatagattttctaatggtgaaacatcactaattgaaaagggaaaattattaaggccatatcaaaaggaatataatctttttatgattggtataacagatacaaaaggaaatgcttcaagtacatatagggaaaatgttaactcaataaaagataagcctagttttgagaaagcaattaaaacaaagcaagtagtagtttcagatattgaagtcagtaatgtaacaggtgacaaagtatttatcatatatgtaccaattgtaaaaaataatgagatgattgggaccatttttgcttctttttattttcaagatgtaaataatttaataagtagaagcaattttgatgattctattaaatttctaatgatagataaagattatactattatttctcatccaaacaaaaaatatgtaaatgataaaagtaagatgcttgatttagaagggaatattataggaaccactaaaagtgaaatcttaaaaaatataaataaaaaatgtcaaggtgattttttatcttgggataattggagattatataatgtaaaatatacgaacataaagtggactaattggactttagtatcaaaatgtaatatatttaagaactttaaaaatctaatagttaattttatgataaagttgtatttttatatagtaatatttatgatattgtggaaattaagtaatgctaaattaatagaacaacttaaaaaattggcttattatgattctttaagtggaataaaaaataaagaaaagtttagaaaagattctatgtatattttaaagaattattatcaagataatttttacttagtacaattggatgtcaataaatttaaatatataaatgagatgtttggatatgctgaagggaataagatattaattcatatatcacaggttttaaataataatacaaataaatatgaaatttgtgctaggatggataatgaccattttatattgttgattgcttgtaatactgaagatgaacttttaaatagattatctaaaataaataaagaaatttgtaacttaaatactactaactcatctaagtataaaattgttatgtcaagcggaatatataagattactaaaaaggatgatattaaaaagattgacctgttaattgatagagcaaatattgcagcaaaaagtaaaaaggaaaaatatgaacattcatattcgttttttaatgaagatacaagaaatcgattgtacaaggaaaaacgattggaagataatatgaataaagctttagaaaaaggtgaatttatagtatattatcaacctaagtatagtttagatgatgtaaatgaaattgaaggagcagaagccttgataagatggaatagtccagaatttgggtttatttcacctatagattttgtacctttatttgaaaagaatggttttattgtaaatattgatatgttcgtgtttgaagaagtatgcaaaacattaaacaagtggataaataaagggtatactcctgtaccaatctctgtaaatatgtctagagttcatttatatagggataattttatagaaaatataactgatttgataagtaaatacaatatatctcctgagtttattgaacttgaactaacagaaagtgttgtgtttgataatttaaatatattgattgatataatgaaaaagattaaagagataggattccttatatcaatggatgattttggttcgggatattcatctttaaatctgttaaaagacctttcttttgatattttaaaattagatagaggatttttaatcgaaacaacagatacaaaacgtggaaaaattattatttctaagattgtggaaatggcaaaagcgattgatattaaagtaatctgtgagggcgtagaaacttatgaacaagtagagttcttgaaagagataggttgtgataaggttcaaggatacttatttgctaaacctatggtattagatgaatttgaaaaacacttaaactttaaatttgattaatcattaataattattagactataatataccctaacaacttacttacaaatatgtaagttaattgttagggtatttttatggttaaagtagtatattcacgatattatggtattgtagtaaaaataaaaaattatggagaatataaaatgaacatattgagtattagaaatatatcaaaaacatattgcggaaatattccatttaaagcattagataaggttagtctaaatatagaaaagggagaatttgtgtctgttatgggaccatctggaagtggtaaatctactcttttaaatataatatctacagttgatagacagagtgaaggtgaggttgtattagatggatatgatgtaagtaaattgaaaggagaaaaacttgctgaatttagaaggaaacaacttggttttgtatttcaggattttaatttgattgacactttaactgttggcgaaaatattatgttgccacttacactagagggggcaagtatcaaagatatgaatatacaaactaaaagtatatctaaatttttaggaatagataaaattttagatagaaaaacctatgaaatttcaggaggtcaagctcaaaggtgtgctattgctagagctattataaataaacctaccatacttcttgcagatgagccaactggaaatcttgattcaaaatctactgatgatgttttgaaattatttactaggataaacaaagaacaaaatgtaacaacacttatggtaactcatgaagtatatagtgcaagttattcagatagagtaatttttataaaagatggttgtatatatacagaaataaaaaaatctgaaagcagtaattctttctattctgatatactagctgttttgtctcaaataggaggtgtaagatagtggattttagaaagtttgcttataataatatagttagaaatttcagggcatatttagcatattttttaagttctgttttttctataatgatattttttgtttttgcagtgtctatgttccatccgattataacaaaatctggaatgcagagtggttctactgcatttatggctcttatgacttcagaattaacaatattaggttttagtctactttttatattgtactctttaggaaatttcttgaaatatagattgaaagattttggagtattgatgataattggaatgagcaacagacaactgaaaaaattgatattaattgaaaatttgataataggatttttagcagtgatgttaggaatattacttggtttatcaatttcaaaattgtttttattgtatttaagcaaactgttttatatgaatttaactgaaatttattttccagtaaaagcaatactattgactattgtatcatttatgattttatttttgataacaggaccaatgagcttaaaattattgagaaaaaagagtattttagagcttttagtaggtacaaaaaagcctaaaaaagagataaaatcttcaaggctatttggaataattggtgtaatatgtcttatattaggatatgctatgatactatttggcaataagttaaaaataaatggaggtatgtatacaacagcactattaattactttggggatatttttatttttttctcaatttactattttgatattaaagtatttaaaaaataaagaaaaattttataagaacaaagtaaatatgttacttataagtaatttgatatataaattaaaggataatacacgattgttatttttaataacaatacttttatcggctactttagtagcatttacaacaacttcaacacttgtaagttctcaaggagaagcttctaaaaataatttcccaatggtttactcatatttttcagagcataataatgaaaaagaatatgaagaactacaacaaattagagaagcaatcaaaggatatgattataaggagttaagttttcctgtacttaaatataatagggaagtcttactaagtgtaaagaattataacaaattatcaaaggaattgggattagataaaattagttcaaagttagaaaaatatgaagggattataattcctagtagcaattcacaagaacatataaattctttaaaacaattaaaaaattatagtataaaaaatttaaatatagaagtaaaaaaatcaaaaaataaaataatttttcctacaggactgtttagtaaagttgtagttataagtgatgacttatacgatgaagtaaaaggtgaattttcaaaaattaattttcatggatttgattataaaaactggcaaagcagtgcaaagataactgaaaatttaaaagaaaaacattttaatttggatagagaatataacaggtcatattttttaacattaccagatatgtatttagtagagttacaacaaagtaaaattcttcaatttatgggtgtttttataggagtgatattatttatagcagtttttagttttttatacttcagattatatacagacgagatagaagataatgtaaagtacaaaaaactatcaaaaataggtctatcttttaaaaatatgaataagattgttagtatagagataggtacattgttttttataccgtattttatagcaattataaatagcataatttctttactgtttttaaatcaagtattaaataatagttttaggttagaaaatttgggtatattactactgatatcatctatatattcactttatttttacttattaaaaaaaatttatactagaaaagtttggttttttgattaaagtggtatataatagatatataaattaatatttaaaaagtagttaatattaggggagggcatttgcacctcccttgtaatatgtggaaaattgaatattagaagaaggaggagacttgatggaaaatcaacaattattaggaacagaacgaattagtaaattactactaaaatattctataccagctataataggtatgttggtaaatagtttatataatgtagtagatagaatttttattggaaatataccaggggttggaccacttgcaataacaggtcttggtgtaacaatgccaataatgacaataatacttgcatttgggatgttgataggtataggaactactactaccatatcaataaaacttgggcaaggtaaagtagaagaggcaagaaaacttataggaaatgcaatgacgttatctgtaataacaggaattatcataatgatacttggaatattatttgcaaataaaatacttacattgtttggagcaagtgaaaatactttaatatatgcaaaatcatatataaatattatattattaggtacagtagtaaatcttctttccttttctttaaaccactcaataagagctgatggtagtcctaaaatttcagcaggaataatgatagtaggatgtttaactaatatagttttagactggatattaatatttggattcaatttgggaatacaaggagctgcaattgctacagtaacttctcaggctcttacagctattttaactatagggtattatataagtggaaaatcaaacttacgattcagtaaatctaatctaaaattagataaaaagctaataaaagcagtgtttgcaataggtatgtcgccatttgcgatgcaacttgcagcaagtttagttcaagtaatatcaaatattgcacttaaaactcatggtggagatttagctataggggctatggctactatttcttccattgcaatggtatttttgatgcctatctttggaataaatcaaggagcgcaacctattataggtttcaattatggagctgaaaaatatgatagggttaaaaaagcatatttaggttcattagtagtagctactataattttatgtatgggtatggtagtagttatgcttttcccagaagctattataggtatatttaataaagaccctgaacttatgaatatatctgttaatggattaagaatatacttacttatgttgccaattgtaggcttatcagttacaggaacaaactttatacaatctataggaaaagcaaaaatggctatgttattgagccttttaagacaagtaattttattgataccagcagtattaattcttcctacattcttaggtttacagggtgtatggacagctcaaccagtgtctgattttatagctacagtaattacaggtatagttgtatttagagaattaaaaagatatactcctaaaactgaaaaattaaatgaaaatgaaagactaaatgagataactactgagtaaaaatataaattcagataattgagcaagaaattgcaaaaaatacgattatatgataaaataaaaccgctgtcaaggataagagaaattctaattatggagtgattttatggaatttacaaagaaaagcaaattaaaaaatatgtatgtaaacatgaatgtagctagaatgttgtctaagataaatgagtataagggtaggcaactgctttacaaaaaacaaccaaaagaaattttagaaaacctagaaaaaaaatctttagtagattgttctgaatctacatacattggaaatcaaagagatagtagtaattttaatctagaaaagttgataagtaatgaagttacacctagaagtagagaggaattgagtattgttgaatacagagatgtggtaaaaactattaacagtgcttatgagagtattcccatcagttcacaaacgattcttgagcttcatgggtacttatataaattttcatctactagaggaggaagttataagtcagataatgattttattgaacacaatttaaaacctagcgaatttataagtattgattcaagtgtcaataaagttgaaaaagctgtagaagaaatatgtgaagcttataatacattgatagaggaagatgaaattgatatattaatattaatttctgcatttgtgttagatttcatattgatacatccattcaaagaaggtaatataaaaatggcgagagtacttatcctattgttactaaataaaaatgggtatgaagttggaagatatataagtttaggaaagatatttgatgatagttcatatgaatattatagtaatttaaattatttgaaagcctcaataggtagtgaaaaagcagatatgaatgcatggattgagtattttttagagacgatattaactgcatatgagaagctggatgatagtttaaatatatctgataagaaaagacaaacaaaaactagtagaatagaaaaaataataaattctacccttggatattttacaaaagaagatataagagatttatgtcctgacattccagaacctactataaatagagtttttaataatctaagaaaacaagataagatagaagttgttgcaagaggaagaagtgcaaaatggaagaaaaaatattaaaaaatgtttaaataactaaaatggtatagtgttttacactataccatttttaatgtcattagcatgagcaataatttaacaacttaagcaatatcaattttatttattgattatttttgaactgaaaaatggggttatatggtatactacaataataattaattttggatgagaatatataacgttacagaatatcttaggagtatatgtataaaaaatataataaaagtgtgaggtttagtaattaacaaattatgtggcttcacacttttttataaaataaaaatacttagcagaagaatattttagttgatatgtttataagatagtacttgtttgggtaaaagtataaatagtaaaaaagtagaagtaatgtgtataaaaacataagttacattctgtaataatagttattttataattcaacaaaagaatagaatgggtatatttgtgaaataataatataaaataatcttaggagtgatcttatgaagaaaaaattattatatataaatgtaaattcaaaacctgaagacttatcttcaagtaaaactgtagcaagaaaatttataaataaatttatggaaaaaaacaaagattttgaggttgaagagatagacctttataaagaacatataccgagacttgagtatcagtactttgaaaaaagaaatagcatagttagtgaagaaaatgctaaaaatttagacgataaggatagaaaagagcttacaaagattagaaatctttgtgaccaatttgtgagtgcaagtgtttatgtaatagcagcacctatgtggagtttatcttttccagcaccacttaaagagtatatagattgtataattcaagatggaaaaactatatcttttgaaggcaatgataaaccacaaggaattttaaatgatattgatagaagtatggtatatatacaatcttctggtggacacataccatgggtcttgaagccagttatgaataaagggttaaattatgtggaaagtattatgaaatttataggaattaaaaaatttgatgaattgttagtagatggaactggaactagtgaagaagaaagacaagctgcaatagaaaaagcatctgaaaaaatacatggtataatagatggtatgaaattttaattataatattttattaaaaatataaaggaaaaacctcttttaatgtagaaacttatattgaaggaggcgagaatcatgcgagaagaaaaaagtaatgaaaagtatgattgttattggtgtaatcaagaaaataatttctgtgtagaaataaaagataatatagtaatgatagatgatggcactggtacgttaaaacaagccgttttcatagggtataaacaaatccaaattaatttaaattgttcacattgtcaaaacttaaatagaataaaattaaatttgtagaattttaaaatggaaattattgaaggaattaaaaatagaaagtgttaatatttagactgaaaattatattttatacaataaaagtttatttaaataacattgtattttaatatttattttcagtcttactttattaaaattattttttggttatgtctggaaaatatctgtctactaatttttctgaaatattttttaattggtcagccattgaagtcagacttaataaggctatcaataaatcatctttattttctggatttatactaatattttcaaaattagactctataaagtccggtatattctttctttgattttcttttattaacatgaatttttcgtaacatgaaactaaatctttttcactgaaattatccttttcatacacaccatgtaagattcttttaatttcttgtattgtaagtgtatttttcatagaataaataattatcatctgtaaaatttgttctttagtatacttttttcccttaactggtttgattaatccctctttgctgtaattatttatcatggttttagtaagaattttatcactttcaaatcttttattaggagaaagtttattgtcaattagagaaataatttgatccatatataagtcaatagagggaatatcgtttgaagttatatctgcattatttagtgtttctagtattatagtattaagttcattattcatcatatgttacctccataatatatataatacactaaattagaaagtaaaacaatattaagacttgtaaaaaaaacataaagtggtataattaaatatataatatagtaatgaaaactatatttatgaatctgatttttaaaatacataattgtaggaggacgaaatgtatcaattttttttaaagggtagagacccaataagcagtttaactcattttataggtgcttgtttatctcttttagcaactataattttagtttttcaatctgttacattacaggaaacttctctcttgatgatagtatctgtatcggtatttggactttcactaattgctttatatagtgcaagttcgtattatcattttttaaaggggacaccagaacaagaattgttttttagaaaagtagaccatgcaatgatttatgtattgattgctggctcttatacaccaatatgtctgaattttatggaaaaaaaagaaggcataatatttgttacagcaatatggatagttgcatttattggcataataataaaaatattttggatggatgcacctagatggttatctaccagtatatatttacttatggggtgggcaattgtttttgatataaatgcattcaattcaattcctaaggattgccttagactattaattatggaaggtgtatcttactctataggtgcaattatttatataattaaaaagcctaatataagtcctgagtttggatttcatgaaatatttcatatttttattatgataggttctttatttcactttttagcagttttattgtatgttttatagttttaaaagatttgattaattgatactaaaattctacaatgaataaaatggaactgccttatatagattatatcttcgacaataagacagttccttattataaatattaaattctacttataataaaattttgataaaaatagtccattcaaaatgcctattccataattcctttaatgtacttttcatttacgacatatagtttgaatttatgtactataattatatcctctaaattctctgaaacactaacaattctgacacatttgtttctaatttctacaggtaaatctaaatcatttgttaaattcacatagtcatcatatttatacataaaatcatccctttacattaagatatacttattatactatattttaataagtttttttaaattattacaatttttcccgaaatttcattttttatacataaaatttccaaattaggtaaagattaaattttttattgtataaacaaaatttacatataaaatattttattcaaatttttaaataactattgccaatttttgaaaaatatattattattaatagtaataaaaaactgtaaatttagaatattaataaaaattatttgggaggaaattatcatggtgagattaaatatagtaaaattaaatacaaaattaaatcatcaccatcatcatagattaaagggattgtaatatgaaattaattcatagacacaagccctgtttttagtgtaattggtcttgtatctatgatgggaagtaattttaggagaaaattatagccatataggtataaagcctatatggcttttttattgttttaaatttgcaaatataagagtaaatttaatgaagagggtgagaatgtgaaatttttgaggattgaagatgaagttatttattctaaaaaaagatataaattaaaaagggaaatagataaactttttttggatgaagaatattttcaaatagaaccacaattatttgaagaatatgatgaatttacaactataaataataaaattccagaagaatctatggtaaaggttgtaaatggaaaagtaatggtacttagagctgatataactacaagtataataaaaagccttgtaccaagatgggaagatggtttaaagcttaagcttttttataattcatcaatatataaaaataaaaatacagttggaataaaagagataagacaaataggttgcgagtatctaggagaagcctctgtagaagcagatagagaagtagtgaaattagctcttaagatacttgaaaaatacaataataattttattttagaggttgggagtagcaagtatattcatggtttgttagaagaattaaatttaaataagaattgtgaaaatcaaattaaaaatttactatatacgaagaacactcatgaattaaaagtatatattgaagaactgaaaattaagcgtgaagtaaaagagctattatcaaatattttaagcttgcaagggaatttatacaacgttattgaaaaatcaaacaagttctattgtaataataagatgaagcaagctcttgaagaattaaagcaagtaaataatttaattgaggaatgtaattttttagataaggctagatttgatttatcaatgattactatgcttgactattatgaaggaattatgtttagaggatactacccaaactcatataaagaaattcttagtggtggaagatatgattctttaactaaagagtatggaaaagaaattccagccattggatttacactaagtgttgatgagttaatgaagtatgtatataagtaaagtttagaaggagggattgctttggattatttgactatagcactagcaaaaggacgaattgaaggggaatcatttaaaaaatttaaaaaaatgggtctaggagatagtatagacacagatacgagaaaactaatttttaaagatgaagaaaataaaattatatatatacatgtaaagccatcagatgtagttacatatgttgaaaaaggagtcgctgaccttggtatagcaggtaaagatactattttagagaatgagacagatgtatatgaaatatatgatttaggttttggaaaatgtaaatttgctgtagcaggattaaagggagatagcatatatagagaagatgaatatctaaaagtggcaacaaagtatcccaatatagcaaaaaagtattttaaagagaaaggtcaaaaaattgaaataataaaattaaatggttctgtagaactagctccaatagtagggttgtcagatgtaattgtagatatagttgagactggcaatacacttaaagcaaatggtcttgaaatattagaagacatatgtaatataagtgctagaattatatcaaatagagctagctatagatttaaatatgaacaaattcagaatataattcgtttatttgaagaacttgataattaaaatataattgaactttataaggagggatttaagttgagagaaaaagaaagtataagagagttaaggggatatgaaccaaatcacgtaaactgtaaagtaaaacttgatgcaaatgaaggaagtaagaggttgtttaaataccttattaaagaaatttcagatagtgatatagatttaaatttatatcctgaagattcttatagtgatttgaaagaatctataatagattacataaatatttctggagtaaataagaaaaatcttctagtaggaaacggttcaagtgaaataattgatttaataatacatacttttgtagataaagatgaagtaatattgagtttctctccaagttttagtatgtattctatatatagtcagataaatgggtctaaatttataggtgttgaaagtgatgaaaatttagttataaatatagataatgtgattgaaaaagtaaaggagaataatcctaaaatagtaattgtatgtaatcctaataatccaactggaacaatattaaagagggaagagataataaagcttttagattcaactaatagtctagtggttttagatgaagcatatatggattttggagaagaaagcatgttaagtgatgtttttaagtatgataatctaatagttcttagaactttatcaaaggcatttggattggctggaataagaacaggatatatgttatctaatagtagtttaataaattctgttgagaaagtaagacctccatataatttaaattcattatcagactttattgctacaagagcacttagaaataaagatgtggtaaaggcttatataaaggaagtaaaagaggaaagagaagttttatatgaagaaatgattggtatgggaattaaagcatacaaatcacaagcaaattttatattattttattctgaaatcgaaaatttatcacaaaaacttattgatagaggagttttaataagaaaatttggtggaaagttagaaaattattacagagttacaattggtgataaagaagaaaattctatgtttgttggagctataagagatattttgaaaaaggagaaataggtatgagaatttggaaggtagaaagaaatacttttgaaacacagattttagtagaattaaatattgatggttctggtaaagctgaaatagatactggaataggatttttagaccatatgcttaccttaatgtcatttcatggcaagttcgatttaaaagtgatttgtaagggtgatacatatgtagatgaccaccatagtgtagaagatataggtatagctataggtgaagcatttaaaaatgcactaggtgacaaaaaaggaatacgaagatattctaatatctatatacctatggatgaatctctatcaatggtagcaatagatataagtaatagaccttatcttgtatttaatgctaaatttgatacccaaatgattggtagtatgagtactcaatgctttaaagaattttttagagcttttgtaaatgaatcgagagtaacattacatatcaatctcttatatggggaaaatgaccatcataagatagaaagtatttttaaagcatttgcaagagctttaaaagagggtagtgaaatagtttctaatgagatagcatcttcaaagggggttttgtagaatgaatataatagtagactatggtcttggaaatatagattctgtgtctaggggttttagaaaagctggaatagaaactaaaatttctagtgatatagatgaaataaaacaggcagattcacttatacttccaggtgttggagcttttagagattctataagtgccttagataaactaggattgataccaataataaaggagcatgtttctaagggtaaatttatgataggtatatgtctaggaatgcaattactttatgaaaaaagttatgagtatggagaatatgaaggattaggacttataaaaggaagtattgataaactggatataactttaaaagtgccacatatgggatggaataatctaaaatttaataaggcaaatgatgatatacttaaatatataaacgaagatgattatgtatacttcgttcactcatattatgcaaattcatcaaatgaagaactagttgcattttcagaatatgaaaagaaaatccctgctattgttagaaaaggcaatgtatatggtatacaatttcatcctgaaaaaagtggagaagtagggttaaatatattaagagcatatggggagatgataaaatgataatatttccagcaatagatataaaagataataagtgtgtaagactcacacaaggagaatttgacaaagtaaatgtatattatgataatccattagaagtagcatataaatggaaaaatgaaggagcagaatatatacatatagtagatttaaatggtgctagaagtgaatttggtataaatacaaaaataattgaggatatagcaaacaatatagatatacctattcaagttggtggtggagttagagataagggaaaagtcaaaagtttaataaatgctggtgttactagagtaatattaggtagtatagcgattgaaaatttgaatttggttgaagaattggtcaatgaatataaagagaaaattgtagtttctatagacgctaaagatggaaaagtagcagttaggggatgggaagttgtaagcgatgtagactcattaacattatgtaaacaacttgaaaagataggtgtacaaactattgtttatacagatatatcaaaagatgggatgttgcaagggccaaattttgacatatatgaaagaatagcaaaggaaacgtcattaaatgttattgcttctggaggcgtaacttctatagaagacgtaaaaagactaaaagctatgaacttatatggtgcaataataggtaaagcgctttatgataaaaagatagactttaaggaggcacaacaattatgcttactaggagaataataccttgtctagatgtgagaaatggaagagttgtaaagggaaaaaaatttaaagatatagtagatgttgatagtccagaagtacttggaaaattttatagtgattgtggtgcagatgaacttgtattctatgatataactgcatcaaatgaagagagaaagacatctttagaatttgtgacaaaagttgcagaaaatataaatataccattttgtgttggtggaggagtaaataaattagaagatttcactgatattttaagaaaaggtgctgataaggtttctataaattcatcagcagtcaaaaatcctgaattaataagggaagcttcattaaaatttggagcacaatgtgttgttttatcgatagatgcaaagaaaaatgaagagggttcatggagcgtatacgtaaaaggtggaagagaaaaaactaatctggatgcaattgaatgggctgttaaaggtgtagaacttggagcaggagaaattgttgtaaatagtatggacgaagatggaatgaaaaatggatatgatatagaattattatcaaagataacttctttagtaaatgtacctgtcatagcatctggaggcgctggaaaaaaggaagatttttatgaggcagttaataaatctaatgtagatggaattttagcagcatctgtttttcattttggcgagataaaaataaacgatttaaagaaatatttaaaaaacatgggtgtagaagtaagattataagttaaatactaaaaggagattagaaatatggataataagtgtaacaatgtatacagtgatgaagtagaggaatttataagaagtataaagtttgatgataaagggttagtccctgttgttgttcaagaggtagttagtaaagatgtactgatgttagcatatatgaataaagatgctataaagaaaaccttaaaagataaagtagcttgctattttagtagaagtagacaaaaactttgggttaaaggtgagacatctggtaatactcaaaaagtagttaagatgtcttatgattgtgatgtagatactatactactttttgttgaacaaactggtgtagcttgtcatacaggcaattattcttgtttttacagagacttgtttgatgatagttcaaaaatggagcctgaagtacaaacaaatatattgaaagaattatatgatttaatcaatgaaagaaaaaataatccagttgaaggttcttatactaattatctttttgaaaaaggaatagataagattcttaaaaaagtaggtgaagagagtagtgaggtaattatagcatcaaaaaataccgataaaagtgaacttatttacgaaattagcgatttagtgtatcatacattggttttaatgatagaaaaaggtgttgaaattgatgaaataaaaaaagaattacttaaaagaagaaaatagaataggatagattaatggtaataagaaaatataccgcttttaataaaaagtggtatattttttattttatattttcgatttatagaataatatttaaattacttgataaaattaactatatatataatttattgataaaataattgtagtacattatttattttagaaaaaagataattatctaattatatttaaggataataatatgaaaataatttttatattaaaaaatatgaatgaaaatagtaggttttataaaaaacatatttagattttaacatctaaaaggaattttcaaacctaatatttcatttttaaataaaaaaataaaatattagttttgatttatggtttaaattgggttataataaattgtcaaattatttattaatataaaatagactataaaacaagcaaaaatcatactattatataaaagaccttaaagatagaaaattacagaaagaagccaaaatgtttttgaaaaaaatgaaattttattgcaaaaaaatcaaaatcaatttaacttaatagttataatctatttttagtgttacaaatatacaatgtatattatacaatataaaaaatacgtttatttataaatattattatatttggatttttggtttttataatttttttatatttaaacataactaaaagtaaaagattacgaaagctaagtagagtttattttattttaataaataaaaaagctatttttctatatattggcataatatatgcttatttaactatgaaattaaaattaaataggattaatgaggaggaaaagaatgggaagtaatgaactgaaaaagactcttggcgtatcagcagcattatcaactgttgttggttctgttataggagcgggcgtattttttaaaccacaagcagtctatacattaactggaggagctccaggtcttggtatattggcatggttaatagctggaatcataactataacagctggtcttacagctgcagaagtatcagttgcgataccaaaaactggtggaatgatggtatatataaaagaaatttatggagacaaattaggttttttaactggatggatgcaaattgtattattttatccagggatgatggcagcattaggtgttatatttggagaacaagcatcagcactaattggtagcccatcacttttacttccaatagcaattggaattatagtaatagttgcagggcttaatatgttaggttcaaaaactggaggagtcatacaaactgtctctacaatttgtaagttaataccacttattttaataatggttgttggatttattaaaggtggtggaaataatccaatacttacacctatggttggtgaaggattaagcctgggtagtgtactaggtcaagttttaattgctatattatttgcttttgatggatggatgaatgttggtactttagctggagaaatgaagaatcctggaaaagaccttccaaaagctataataggtggattgtcagttgttatggctgtttattttataataaatttagcgtatctttgggtattaccagctaatgaattagcaaattatgcttctcctgcatcagcagttgctgaagttatatttggttcaatgggtggaaaaataatatctgtaggtatattaatttcagtgtttggagcattaaatggatttttactaactggttcaagggtggcatatactttagctacagataagactttaccaaagtatggtatattttctaaattaaattctgctcaagttccagcaaatgcaatagcattagtatctgttattgcatctatatatgctttgtcaggtcaatttaatttattaactgacttagctgtatttgctacttggatattctatgtattaacttttataggggttatgaaacttagaaagactcatccaaatataccaagagagtataaagttccattatatcctattgttcctataatagctatagcaagtggtatatttgttgtagttaatcaattgtgttttgcagggatgaaaactactatgatatctataggaggtcttgtaataacagctataggcttaccagtgtatgcttatatgactagaggaataaaaagataaaccaagtagtttacaaatgctttataattaaaataaaagagactgtctcaaaatagagataagtctcttttttattgttaaaagggtaaagagatgttttattttataaaaaaagagtgttctatgaactaaaaagtttattttaaggtattcactttatttttagtttttgaattataaaattaaacatctaaaaaattatttgctttaagatactttattttaaagtgtttttttttcaaactaagtgatatctatataacaaatattatacataggttttatgaaaattaaatctttctgttatataaaatagaatattgtattatatagaaaatattacctgatcaatatcgtgatttataaataagattagaaaattttatttgataacaaaaattagacaatatgaatatataatgtatgtattaaaaatgtggcaaatagttgttttggtatttattatttgtttaatatttctaatttataaaaaaaaaattataaattttaaaaattataaatgacattttaactagaattaattgtaaaaaacactatataatactcaattttcaacattctatacaattatacagaaattatacagcataataatcaccgaaataacaaattttaaaaattaagcaaaactttttgtcgaagttcaacgtctatatatatgtagtgtaaatttttgggataaaatactacaaaaatataaatgtaaaaatatagtaatattggaggtcgaacgatgagaaataaaaagaaaaaaataaatagaaagaagttgtatttgcttttaagtgctattgtagtgtgtctggcttttatagtagttggtgttcgcgtcagctctttaaatatgaaggaaaatgaaattagtagaaatgcaaaactgtcaagttctactattacagatatagtatctaatacatcaatagaagttagtaaagggccaagtaaaagttctggaaaaatagcatacataactatagatgatggcccatctaaatttactgacgagatgataaaaactttaaataaatacaatgttaaagcaactttttttatgatagatgggaatatgaaggaatatccacagcaagttaaaaatataattaaaaatgggaacacagcaggttttcatagtgtatcacatgatattcacaagctttatgttactagtacatcagcaaaagaggaatttgatacaaatgatcaaactttttataagataactggtaaacattcaaaagtaataagaataccttatggaagcaaaccatatacaccacaagcctcttatcaggctttagttgatgctggatataaaatttgggactgggacttagatacagaagattggagatctaattcttctcaaattgtacaaaatgtaaaaaatcatattaagaatagaaaaggtgaagataaagaccaacttgtagttttaatgcatgagaaaaaacagagtgcagaagctttagattcagttttaaaattcttatcagatgaaggttatgaatttgcgccagtagatcaaaaccaaataccaaaaaattattggttacgtaatttagagtagttaaaatataagaatattgattgatatttttagaaattgagaataaaaatgagtgaggtgtaggtatattgaataaaaaactttatataggaatggtcggaatattgtctttgatgatggttggttgtaataaaagtttagcaaaagtaaatgatgtggaaatcacaaaagaacagtacaaaaaaacaaaagcagttttatctgctactaataattatataaatgggcagtctttagatgaattagaaaaaactttggataaaaaaggtagaaataaattagaaaatgttataatatcgtttatggtggataatgaacttttatatcaagaggctaaggataaaggactaactccaagtaaaagtgaagtagactcaaaatatcaagaactagaagataagatgaatttgaatacaagctataaggaaaaaatggacaaagcaggtgttgataaagaatatttaaaacaagaaatatctagagatttagcaatagataaaaataaaaaggcctttgaagatagaataaacataagtgataatgatatggaagcctactatacaagtcataaaaaagattttaatgtagaagaagtaagtgcttctcagatacttatatcgactttagataaaaataaaaaagaagtaagcaaagataaaaaagaagctttgaagaagaaggcagataatatattgactaaaatcaaaaatggagaaagttttgaaagtttagctaaaaaatattcggatgataaagcaactggaaaaaatggaggacagctaggatattttacaaaggatgataaaaatgctgagtttacaaaggaagtgttcaaattaaagaaaaatgaagtttcaaatgtgtttgaaactagttatggatatcatatagtcaaagttactgataaaagagaaagacaaaaaagttttaatgagtgtcagagtttaataagagaatctattttaaatgaaaagtatattgagcatataaaaaaactgaatgaagatgctaaaatagacagatagaatttctaacagctcaatcctagcctgtaatcggagggagattttacaggaatgtttaagagtttaaagagaacgaaagttgagaaatacattatcgataataaagactctttttatagaatagcatatagttatacgaagaatgaagaagatgccttagatgtggttcaagaagccatgtataaggcactatactcagtggaaaatattaaagaagtaaattatataaagacatggttttataaaattttagttagaacgagtatagattttattagaaaaaaccgtaaatataataatatgacagatattgaccttatagatgagactggagagtatgataaatatactgatttggatttaagaagagctttggaagaattacctattgaatacaaatctattataatattaagattttttgaagatttaaagattgaagaagtagcaataatattggatgaaaatgtgaatactgttaaaactaggttatatactgctttaaaaaaactaaaattaaaaattgaagagtagggataaaaagaatgacaagcaaagaaaggttaaataagttaaaagatgagtatcataaaattccaatacccaagaaattagatactataataaatcatgaaaaaatagaaaacatatatcgagagaaaaataaaaaagtaaatagattaagatttaaagttgcaatagcctttgcatgtatatttacagtattagtaaatataagtcctgtatttgcagacaatttttctaagatacctgtaattggagtaatagtagaagtaataactataaaaaattatagtttaaaaagtgaaaattatgaagctgagattgatattcctaaaatacgaggtttaaaagataaaaacttagaacaaagattaaacagtagttttatggaagatggaaaaaggctttatcatcaattccaagagagaatggagaagatacaatcatcaaagaataaaggatataaatctttaagtttgagttatagtgtaaaaaataattctaaaaaatttctatcaatagagatgacaaaaaatgagatagaggcttcatcatatgtgagtaaggcacattatactattgataaaaaaagacaaatagttttgactttgccaatgctttttaaagatgataagtatataaaagttataagtgataatataaaagaacaaatgagagaacaaatgaaaaaggatagtacaaaatcctattttatagatcaaaaaaaagacttgcctgttgaagattttaaaacaattaataagtatcaggatttttattttaataaaaatgaagaccttgtaatttgttttgatgaatatgaagtagcacctggttatatgggtgcagttgagtttgtaataccatataaagtaataaaagatttgtaaattgaatagtagtttatatatacatattttaagaaggacaatatgactacatataaaaagcttaaaaaatctatatttaaaatttctatattttcaatatgcttattagtctcattagtagatataaaccctatatttgcaggtagttcctctaatgagacttcaaatagtgatacgataaaggtgttaaatgctaagagtctcaactttaaacaaggcaattatgaagtgaatgtgagtattcctaaaataaaaggtttaaaagataaaactttagagaataaattaaacaatgagtttttgcaagatgggaaaaaaatttacagtgaatttcaaaataaaatgaaaaaggaaaataataagggtcatagatacctaaatgtaatccataatgtcaaaaataattctaaggactttttatcaatagaaatgacaaaagaagagatagaagattcctcgtctataactaagaagcattacactgttgataaaaatagaggaatactattaaatttaccaatattttttaaagatagtagatatattagagctataagtgataatataaaagagcagatgagaaatcaaattaagaaagatgatacaaaatcttattttatagaccaagataaagacttcccagtgaaagattttgaatctataaataagtatcaagatttttattttaataaaaatggaaatcttgtgattagttttgaagaatatgaagtagtacctggttatatgggagcagtagaatttgtgataccaaataaagtaataaaaagactaagatagatatatagaagatttttagatagactggtaaggagaattatatgaatatatatgaacaagcaataagattaatagaaaataatgaagatttcgcatttgctacaataacgtctcattcaggttcaacaccacgtgaaactggagcaatgatgattgtgaaaaatgattctactatatttggttcagtaggaggaggtagtgtagaagcagaatgtataaaacatgcaattaatgttataaaaaatagagaatcaatgttgtataaatttactctaaacaaatctgatgtggcaaaactaggaatgatatgtggaggtactggagaaatacaaatagattttatagatagtaaattaaaaagtaatatagaaaaattcaataagagactaaaggaaaatacaagtaaagcatatatatttggtgcaggtcatatttcaagagatgttgctgtgatactatctcttttagaatttagaacagtagtaatagatgatagagaagaatttgctaattatgaaaggttcccagaatcagaagtagtagttttagattcttttgaaaatataccagattttccaactgacgaaaatagctatataattattttaacaagaggtcatctatatgattcaagtgctttagaatgggctcttaaaagagaaactggttatataggtatgattggaagtagaacaaaaattggattgacgtacgaaaaactcatgaaaaaaggttttaagaaggaagaattatcaaaagtacatgcaccaataggcataaaattgaatgctcaaacaccagctgaaatagctgtatgtatagctgctgaacttataaattgtagagctaataaggaaaaataaactaatgaacacagggagtaaagatattgatactttaaatgttaattttagagggattgaaataaaagcagttttagtatataaaaatagaaaaaatatttctataaaaatagatccatttggcaaaataattgtaatgagtcctcctaaaatatccaaaaaaataataaaagatataattattgaaaaaggagactggatacttaaaaagtcagaaaaatataaaggaagagaagaagtatacaaacaaagaatgtttataactggcgaaaaatttctttatttaggtgaagagtaccatctagttataaaagaactgttgaaagattctgtcaaaaaaagtaactgtagaataactattaacgaatatcaaatagttgttcagacaaatgatacaagtacagattttattaaaaaatctttaaaatcttggtataagatggaaagtgaaagaacagtattagagagaatagattttcttaaattaaattgtgaaataatgaagcaattagttccagcaagtgttaaggtaaaagaacaaaataagagatggggaagttgtacagctcaaaaaaatatttatataaactcaaaaatatctatggcaagattagatgtaattgattatgtaataatacatgagtttagccatttagtacatatgaatcactctaaaaaattctatgatttagtaaaatccattatgcccgattataaagataaagaaaattggctaaaaataaatggatataaaataataatctgaaaacgattattccaaaatacaggcgtaaagtataaaagaagtattattgtgaaaaaaataaataatctgaaaattttaaaaaaagtcattgacattgtaaatgatagggaatataatctatattaacaacaaaacagaattaaaatataaaattaaaaaattaaaagcaatgacagagacaacaatactaatagtgttatccacagagaaccaatgttgctgagaattggtgttaacagtagtataatgatcactctggagcttttgtactgaatatttttagtaagtacaaacgtatgtcaacgttacatgactaaggttaaggtaattaattacccgacctgaaaaaagaggggtagatgtattttttatatctacaaataaggtggtaccgcggaatataactttcgtccttataagtaatatttatattgcttataaagatgaaagtttttttattttaagcgatataaataaatttaatccatataaaattaataaaaaaataataaaaataaggagggatttttatggaaaatactgtatatgctaaattaaaccaaggaatagattcttttttaagagtggctatgactctaagaagaagagaggttgatatacaatcaataagtatgactgtagataatatgaataattcaggtataaaattaatagtaaatgaagaaaagacatctttagattctgtcttaaaccatatgaaaaaactacatgatataagagagataactgttgaaagaatgagacattaattaaatatattttataaagctaaagataaatattaaataagaaaaatcttagattaaaatataagtgtcattgaatttatcagtttatcacagttaataaatttattagtttgttgtagctaataaaaactgaaaattctaaaattataattgtaagattatataaatttagaatttaaatctgttgaataatattaaaacaatgataatgagtatgaatttctaataaaaataaatatcataaaaataagaaaaagtattgggaggaaatgaaaatggcaagaatgtattatgaaaaagatgtggatttagaggttttaaaaaataaaaaggttgcagttttaggttatggaagtcaaggacatgcacatgcacaaaatcttagagataacggtgtacatgtagtgataggtctttatgacggaagtaaatcagcacaaaaagcaaaagaagatggatttgaagttaagagtgtagcagaagctacaaaagaaagtgatttgacaatgatgttaatgcctgatgaaaaacaaaagaaagtttatgaagagagtgtaaaggataacttaaaagaaggtcagacattagcttttgctcatggattcaatatacattataatcaagtacaaccaccagaatttgttgatgttgtaatggtagctcctaaaggacctggtcacttagttagaaatgtatttacaaagggaagtggagttcctgcactatttgcagtatatcaagactacactaaaaaagctacagagacagttttagcatatgcaaaagggataggagcaacaagagcaggtgttttagaaactacttttaaagaagaaacagaaacagatttatttggagaacaatcagtactttgtggtggaataagtgaacttataaaattgggatataaaacgcttgtagatgcaggttatcaaaaagaagtagcatactttgaatgtttacatgaaatgaaactaatagtcgaccttatatatgaaggtggatttgaaagaatgagatatagtataagtgacacagcagaatatggagattatgtatctggtaaaagggtaataactgatgctgcaaaacaaggtatgcaaaatgttttagaggatatacaaaatggaaaatttgcaaaagcgtggattaaagaaaatgaagaaggacgtgaaaacttcctaaaaactagagaagaagaatataatacagaaattgccgaagttggtagaaatctaagaagtatgatgtcattcttaaaataaatatatattaaatggattagtttgagggaaagagtggtgtatagtagtgcgtatgaatggagcaaaggtaattttagaatgtttaaagaaagagggaattgacacaatatttggatatcctggtggagccgtgatacctctttatgatgctctatacgattattcagatgattttaaacatataaggacatcccatgaacaaggtttagttcatgctgcagatgggtacgcaagaagtactaatacagtaggagtttgttttacaacatctggtccaggagcaacaaatgccataactggaatagcaacagcttttatggattcttcacctatggttgtaatttcagggcaggtgccaactagtttattaggaaaagattcttttcaagaaattgacataactggagcaacattatctatgacaaaacataattatttagttagaaacactaaagaattagttcctacaataaaagaagcttttagagttgcaaattcaggtagaaaaggacctgtacttgtagatgttccaaaagatttatttttagcagaaatggattttagtggtgaggactatgatttatgtcaaatagatgattatatggattataagagtgattttgatctagatgatgaaactaatattaagcttttaaatgaagcaatagatatcataaaagaatctaaaaagcctgtaatatatgcaggtggaggtgttaaatcttcagacagtgaggaaattcttgaaaaatttgcaactaagatagatacacccgtactaaatacacttatggggcttggaaatatagatagaaagaatgaactatctcttggaatggttggaatgcatggaagtagagaaagtaatttagcactttctaattcagatttagtaatagcgataggtgcgagatttagtgatagagtgataagtaaaagttctgaatttgctaaaaatgcaaaaataatacacatagacatagacccatctgaaataagtaaaaatatagaatctaatgtatctttggttggagatgtaaagctagtccttagtttattaattgaaagggttgaaagtaagaataatagcaattggaaagaagagataaagacatttagaaagagtgagggtgtacaaacatatgaatttcatccacaaaatatacttaaaaaaataaatgaaaaatatgaaacattaaagaaacccactgtggtagtaactgatgtcggtcaacatcaaatgtggtctgctaaatactggaattttaaaggtaataaaagttttataacatcagcagggttaggaactatgggatttggtttaggtgcagctattggaactaaagctggtaatgtagataaaaatgtggttttagtaactggtgatggaagttttagaatgaactgtaatgaactagctacagttgcaaattataatgtacctatgcttattttactactcaataatagaacattaggaatggtaagacaatggcagaagttattttccaatcaaagatactctcaaactgatattaatgaaaatgtggattatgttaaactcgtaaatgcatataatattgatggatataaggtatccaatatggaagaattaggaaaggttctagatgtgatagattttaataaacctgtatttttacaatgtgatatagataaggattatgatgtttatcctattgtagcacctaatgatgcattggaaaatttgatatgtaactaaaacttatactgaatattgataaaattttttattaaatttttattggtattcagtttttgtttagagatagattggcattttttatttttgcaaataaatcaatgaatatataattaagaacttattaaattttaattatacaatttagaatagtattacaacttaagtaaatattaagttttattcgttagatttattattaataccttatattagttatggttgttatatactctaaagccttgaaattacaagcgtatagctgactatataaatttgataattttagcttttaaaatagataaattagattttgccacccatttgccaccgtattatatttttgggtggcaaactctaatttgtaattttttcaaatatatctacagtttcatttttcattttatcagttacatgtgaataggtatccattgtagttgataattggctatgacccaaacggttttgtatgtctttaatgttagcaccattttctaataatagagtagcatgtgcatgtcttaaagaatgaaaatggaagtcattgtttaaagctactcgaatttgtcttactatagtgtctaaagtgtgagtattcacttgttgaccattttctttggtacatacccaatcactatcaaagtaaaattctccgtattttaatttcattttcttttgatataatttatgttcttttaatgcctttattaaagtgtcacctgtaaatatagttctgcaagagctttctgtttttggttgccctaattcaaacattccatttggttttttaatcaaagtatgctttactgtgatagttttattatcaaggtctatattatcccattttagtgcaataatttcacctcttcgcataccagtatgaaatccaattagtaaaactatacgttgaaatgaatcttgaggaaatatatttagtatttgattaaattcttctaatgtaatagttttaactttattagtttctgttttagatttagtttttggtatgcttacatattgcatagggttttctcgtatgtgtttgtaaggatggactgctgattttaatgacctatgtaatatggcttttaatacttgtaatgtattttgagaataatcctctttgtactttttatttatgaagttttgtagtattgcaggagttaaagcttttactttgtaagctcctagttttggctttatatgtttttctatgtttattcggtagctttcttgagtgttgtatttacagttgagtaaaacatattctttgtaccaaaagtctaggtagtctgataagctgatgttactttcttcaaagactatgccagagttttcatattcatttagtgcttctcttagtgctttttctgcttctttttttgtattgccaccaactctttctactttttttctttttccttctactatgcctaggtcaaagtagtaataccatttgttgcttctttttcttactccacctttcataatagtatccctcccttttagaatgtatgtttgtttggtgtttatataaaaaatgtctcctatatttacaagaagacattaattatattcgtcaaataatatttctaatttaacttttatacattcatcacaattattttctttgttaacaaatttaataatgcaattatactttaatcctctatttattatacttgttaattctccactataatatctaggaatgtaacctatatgattctcttttttatcaaataccttgattgcatgaggatcaaatttattttctggttctaactctagaactagagcttcatttgattctaattctattgaattatcacattcatgtccttcacacccagcataatgtcttactcctgcaatataaaaatatctaattatatttttatcaatgtccaaaggaattggatctacaaattctagtgtatctataggtaatcttgcaccacttctttttaaaagttcatatgtatcatactcagacatatcatacttatccaaaattttattgatgtcctttctttttttatcaggtaatctacttgcaaatgggctaaataaatcttcactataatatgttttactaatatcatcaaatgatattaaagcattaaaacctgctttaatagcttcatcaatttcatattcataagaaaattcatacaatccatttttagctaactttccaattataaattgtcttctactttttggatctttccaaataacatataaaaaatcttttccatttttaattgacattttatccctctttcacaaattatatatattttttattcttaacactttttcttttagatatatttttagcaatttttttaactttgggcttataatattttctgaatagttatctattaatgtatttatgtttacttcattcataagatttattatcttttctacaaaatctatagtttgttcataataatttgaatttaaatattttagcacttctaagtgtgttggttcttttttattttttccatctatccttattcttgatcttgaacgtgtatttataagagcttcaaatctttgatgatcagtgaagaaagaatctatgttctcaatattaacataacaacataatgatgatccgttatcatatagaggactaagagtaattttattttgactttctagtagagcccaattattttgatgcctatctctatttccaatcaagtaatcaaaaattaacatttttagaaaatcattttttatgttatattcttctatagatttaaaaatcattttcaatgaatagtattcattatttttataatcatataacttatctgtattataacaaggataatatttgtttattaaccacacgccttcaatcaatttctcatcatttttattgattaaataactcattgaaccaattcttttattatatgtacctatctcaacattagcacaaggaatctttaacaaactagctatttcacaggctaatttttctgcccaatattctccagtttcttttgttttagggaatttaaacaagcctatatctttagttttttcattaattagccagattttctcgcttcttccactaccataagaaaaaccatcatactctttccattcatcaaaatttttaatcacgaaaataatcctctcaaacaagtattttatattcttattgtatcatttgattctaaatttgcaagaattttattatccataataagcttaacttaaaataaaaattttttctagattttatttattccacttttaacttcaagctttattacatatggaatatgtgtttactcatcaaaattactactgtgtataatggttttactttataaatacttaattttagttttctatatttatttggtaatttttttgagtgttgttaagtaagaaatattttttgtaccaaaaggtaagctgatattgctttattcagatactatgcctaggtcaaagtagtaataccatttgttgcttctttttcttactccacctttcataatagtatctctcccttttagaatgtatgtatgtttggtgtttatataaaagagcagattaactgctctttatatacttttgttatgtacaatattatcttaattttgtttatctggtttttacttaattattttcttaatattcttacaattttttagcttttatgtgtagtttattataataatattgaaatatatatttattaagtaaaaaatctataaaagtagaataaatgagtttaaaaaatatcctcatatatgtagaaatttggcaaattagttaatactaaaaatctattatttcctaagtccaacatgcttttcttttttgatagaaattctaatctttttagtaagaagttgatgctaacttgtaattcttcagctatttcgtatacacttgtagcgtgtgaattaataacatgtattatttcttcttctgttataagaaattcacatgcccattttagtgctttgttttcagttttgtctatcaagattttatttttgtaactgttttttgaagatacatagtttccaacactggtaaaatgatgtcctaattcttctgctaagatttctattagtttagcattgttttgttttaatgaattaagtaatgatataatttttagtccttgtctgtttatatacaatccttttatgtcatctgctattttgtcagtgtagtaaatttctatctcttcattatttgctaagtctaaaagtgcgtctagtttgttcattgaaatccccctataaaaagaatgtatgtgttacttttttatatataaagagcaggagtgaactgctctaaatattcattttttatatctatcaactaaaaactctatgtagctattaatatgttcttgcgcttctttaggtaaactttcataagatttaattattttggatatttcatcagtagttatgtaattttcaattgaggttttaccaagtagataatcaactgacacattaaaaaattctgaaattcttaacaagtcttctttaacaggttctcttttgctagtttctaacatagcaattttgcttagtgaacaattaagtaattttgataattctgcttgagttaattcttttttctttcttaattcttttaaccttattggaaaagttgaatttaagcattttgttaatttatttgaatcatctatgttaatttttccaattaagtaatctgtagatactccaaaatagtctgagcaatctttaataaatgattcttttggttctcttaacccattttcaattctggataaagtggatttatttatatttaagtctgtgcttaatttatctaaagaaattcctttttcagttctcaatttttttaatattaacatagattcaatccttattttttatatttattcattaaaaattcaatataatcgttgagttgttcttgagcttcctctggtaaatctttgtgaggattaactctgtgtgcggctacagtatcgatgtgatttctaacaagagttctacccaaaagataatcaattgatacatcaaaaaaatctgcccaattttctagaatatttatttctggttttcttttattattttcatattgcgatattgttgatttattaaaacttgtaaagtaaactttattgaattttgaaactagttcatcttgagtaagttttttctcttctcgtaattgtttgaaacgttctccaaaagttgccacaaacaacacctcccaataattaaatgatactataagtttacagaaacgtaaacttatgtttagaaaaaaataaaaaagttaacaaaaaaataaacttatgtattgacaagttttgtttgtgtgaatataataaaagtatgaagttcacaaaaataaaacattggaaggtgaagaacatgaagaaaagaagtttaaaagctggtcgaatagaagcaggatatacccaagaagaactagcatataagataggaatagcaaaatcaacatataatctaaaagaaaatggaaaaagaaattttacggaaaaagaaatgataatgattagctatattttaaataaaacaatggatgaactttttttagaaaaaaggttaacataaattaaaatttattgttcacaaaaacaatcataaggaggaaagaaattatgaataatttacaaatattcaaaaataagacttttggagaaataagagtaatcgaactaaatggagaattttggtttgttggaaaagatattgcagaacaattaggatataaagatacatctgatgctttgaaaagacatgttgatgatgaagataaaggagtaggtgaaataccgactcctggtggtaatcaaaatatgaaagtaattaatgaaagtggtctttattctttaatattaagttctaagttgccaagtgcaaaattatttaaacgttgggtaactaatgagatattaccaagtatacgtagtactgggacatataatatgatagatttgcaaactaaactaccaactacatataaagaagcgttacaacatcttatagagcaagtagaagtaaatgagcagttacaactagaaagtaaaatgaaagaccaagtaataaaagaactaaaaccaaaggcagattatacagatatgatattaaaaaataaaggacttgtcacaataactcaaatagcaaaagactatggaatgagtggaaaagaaatgaataaaatacttcatgaaagagggattcaatataaacaaagtggacaatggcttttatataaacaacatcaagggaagggatacactcattcagaaacaatagacataactagaagtaatggaatgcctgatgtaaaaatgacaactaagtggactcaaaagggaagattgtttttatatgatttattgaaaacaaataacatattaccagatatagaaaaaggatatagttatcaaacttcaatattaggttagtactttgaaaactaaatacagaatattttagaaaggagagattgaattggaaaataagaaaatagaagaaatagagaaaagaataaccatgcttgaaaatcaattgcaagcacagttatttagtcagataacagctcaatcaaatagtgattttatagattatatgtaccaatgtatagttttgtatttacatgagatgaataaaagtgaaaaaagaaaaattagtgaaattactaaagaaagaatcagaaaataagaatgataattacaatataaaacctattcttctagcaggttttgaagggtcagttttctttactgaagttatcataaagtttatctgtgatgtgtgttgaagaatttcagaataaactccatttactatgccgtagtagtgaattagacaagggttatgataacctacttcttcaacaatcattaagacatcttttccaaagttagtcaattttagtgcaatttcatgttcatcatcaagttctttttcaaattcctctatagatttaagaataattttatattgaaattcagcatagtaaaaatactctgtgttagaagtatcagagactgtctttcttatactttcttgtaattctttagatatattgtttgaaaactgcataatacaccatccttttgaaaattttggaatttattccatgtttatattataccatgtagaactgaggtgaatacaatgttaataggcgacaatataaagcaaatgctaagaaaaagagatataaaaccttataaattggcaaaagaattgaatatagatgtaagtggtttatataaattactgagaaataaaagttctaatccaactatagatactctaataaaattagctgattatttagatattacattagacgaattagttggaagataaataattaaaaagaggggagagaattttcacatggatatttctgagagtatagcaaaacaatttagtgatagtttaaaaagtttaatagaaatagagataagtaaacaagagacagatagagttaagagtcaaactattgaacaaaaggtaaaggtactggagcctaaagatatagttgttttaataaaaagaggttatccaaattatctaataacagtagaagaagcaaggggaattttaaagttagatacagcttttatgcgtaggttagtaagcacaggtttgataaaatcactagttagaggtgatggtagaaaaatttcaagatatgaagttgatgattttattgaaagaaatcaaggtaaaaatttggatgaacttttaaaagcagtagagtggggggatgaaattgctgagtcttgatactaataataagaatgtagtaactcttaaaaaagatggaaaagttatagcagatatagtatttaaagatattaaaactggtaagaaaatatcggttggaatattaaataaaaaagtgttggtaaaataaccaacacacaaaaaaataaaaaataaaatataacacaagtaaagtataacacaaaaaggagatatttaaaatggttgaagttaatgtaaatgtaaaagttaaagtagaagcaccagaatttacaaatgcactattagtagtggcgaatgctttaggaggtcttaatctaggaaaagcaatgcagatagaacctataaatataacagatatgaaagaagagaagaaagttgaagttaaaaaagctgaaaagattaaaaaggtagaagtaaaagaagacgttaaagaagaaatagcagaagcaaaggaagaaatagaaaagaataatgaaaatacaactagtgaagttaaatacacaaaagaagaggtaagaactaaggcagcacaagtaagtaaggcaggtaagaaggataagcttaaggagttatttggtgaatttggagctagtaagttaagtgaagtaaaagaagaagattattcagcttttatgaacaaattagaaagtttatagggggtacataaatgccattacaacatgcaagacttagtgcgagtggagcccatagatggcttcactgcactcctagtataaaattagaagaaaactatccaccattaactagtatatatgcagaagaaggaacagttgcacatgaattagcagaagttaaattaatgctagagtatgaaaaaataagtaaaaaggcatataatgcaagaattaaaaagatacagaaaagtgagtattataactctgaaatggaggactatatacaatcttatgttgagaatgtagttgaattagtaaatgatagtaaagctatatgtgatgatgtaatagtgatgttagaagaaagactcgattttagtgagtgggttccagaaggatttggaacaggagacgttgttgtaatatctgatggtatacttcaagttatagacctaaagtatggaaaaggtttagaagtttcagctatagagaatcctcaacttagactatatggtttaggggcatataatcagtttgaaatgctatacgatattgatttaattaaaacaacaataattcaacctagacttgataacatatcaagtgaagaaatagaagttactaaattacttacatgggcagataatgttaagaagaaggctcaaatggcttttaatggtgaaggagagtttgtaagtggcagtcattgtggattttgtagagctaaaaatgattgcagaaaaagagctgaggataaccttaaactagctagaaaatatgattttgctgacacatttgctcttaataaatatgagatagcagatattttaggttttgctaagaatatacaagattggttaaaggatgttcaaagttatgcactagaacaagctgaaaagcatggtgttaaatatccaggatataagcttgtagaaggcagaagtaatagaaagtatgtagatgagcaagaagttgctaaggttttattaaattcagattatgatgaagaaaaaatttataagccaaggaccttaaaaggaattagtgatatggagaaagctataggtaaaaagagttttgctaaactactaagtgatttaattataaaaccagttggaaaagctactttagtagtagaaagtgataaaaggtcagaaattaatagtatagattcagcgaaaaaagattttgaaatataaatgggggatattacatgccattagatgcaggtataaaagataaattagatgaaagcataagtataattttagatttaaaggatagaaaaaagagtatcgaaaaagatttagattatgaaaaagataatttactagatatgttaaagagactaaatattacagaatataactcaactgaagaaaatgcaaaagttatagtgatggattttaaaagagaaagtttaataaaggataaagtgatgtcaactttcctcgaagtaaatgacaatcatcttgatagagtgtatataccagaacatataaaagttagtccagtatgctttgtatcagtaagagcaaaggataattaaaaatatttaattcctagtagctataaaaagatttaaaaggggatataattttatgagtaatcaagaaataactaaactagttgaaaataatttgaatcttgtacattttagtataaatagattttttaagtcttatgtagagcaacatccatacttatatgaagagttttatcaagaaggatgtattgggttatataaagcagcattaaattatgatagtaacagaggcaagttttctacagtggctgtttcttacataagaatagaaatgtttaaagctttgcgttatggcgaaaaacattatagaaactctatagaaggtttagatgtaagtgtatttgaagatagtaaaagaccattaaaagatatacatggattttatgaaattcaatttaactatgatgttgattatataagaaaaattgcaagaaagtcatatttaaaagatattgataaaatagtagattggattttacaagataaaaagatatctgatataggagagttattaaatgtttcttcaacagttatttgtggaagaattaaattgtttagtaagcaagttagagatttagataaatttggagaaataacttcaaatataaaatcaatataccaaatataaaaatattaggaggaagaaaattatgagtaattcagtacaatcaacaaaggtagtaacaggaaaggtaagattaagttattgcaatatctttaaaagcagagcaatggtagaaggtgcagagcccaagtattcagtttgtattttaataccaaaatcagataaggtgactttaggaagaataaagaaggctattgatgcagctaaagaacaaggtaaaacttctaaatggggtggaaaattaccaggtaatttaaaaacacctcttcgtgatggagatgcagaaagagctgatgaagcagaggaatatgtaggaatgtattttttaaatgcaaatagtacacaaaagccaggaatagttgataaagacttaaatgaaatattagataatacagaggtatatagtggttgttatggaagagttagtataaactttttcccatataatagtgcaggaaataaaggaataggttgtggcttacaaaatgttcaaaagttagcagatggagaagtacttggaggagctagagctagtgcagaagcagatttctcagatgactttgaatatgaagatgaagaagaggacttcttaagttaatgaggaccttatcaattgatatagaaacatatagtgatttagatataaaaaaagttggagtctacagatatgtagactctgctaattttgagatactgttatttgcctatgcttttgataatgaagaggtaaaagttattgatttagtaaatgatgaagagttaccaaaagaagtaatagaagctttaaatgataataaagttataaaatcagcatttaatgctaattttgaaagaacagcaataagtaaatttttaaatattaatttaaaaccaaatgagtggtcatgtacaatgataaaggcgttaacactaggacttccaggaagtttagatagtgtgtctaaggctttaaagtttaatgaagataaacagaaaatgaaagaaggtaaagcattaatacaatatttctgtaaaccttgtaaggctacaaaagttaacaagggaagaactagaaatttaccaatacatgatatggaaaaatggaataaatttaaagaatattgtaaacaagatgttgtagttgaaagagaaataagaaacaaacttagtaagtataagactaccgaaagagaaattaaattatggtatttagaccagagaattaatgatactggtattaaagttgatacagagttaatagagaatgcaatagaatgtgataaaagatatactgaaaaacttacaaaagaagcaattaaaataactggtctaaataatccaaatagtccagctcaattaaaaaaatggttaagtgataaagttggctttgagattacaagcctaacaaaagaaagtattccagaaatattaaaacaagttgatgatgaaaatgtagttagaattttagaacttagaaaattaatgtccaaaacttctataaagaaatatgaggctatgaaattagctaaaggtaatgacaatagagtaagaggtctactacagttttatggggctaataggactggtagatgggcaggaagattagtacaagtacagaatttaccacaaaatcatatagaggatttagacctagctagaaacctattaaaagaaggagattttgatttaatagagcttttatatgatagtgtaccagatgtcttaagtcaattgataaggacagcttttataccaagtgaaggtcatagatttatagtatcagattttagtgcaatagaagctagggttatagcttggttcgctggtgagaagtggagattagatgtatttaattctcacgggaaaatatatgaagctagtgctagtcatatgtttaaagttccaatagaaagtattaaaaaaggtgacccacttagacaaaaaggtaagatttcagagctagctcttggatatgggggaagcataggagctttaacatcaatgggggctataaaaatgggtcttgatgaagaggagcttcaacctcttgtaacaacatggagaaatgctaatccaaatataactaaattttggtgggatgtagataaggcagctaaaaaagccataaaagataggactatagtaaaactccaacatgggattaaatttatttataatccaggagttttatttatagaactaccaagtggtagaagattatcatatctaagacctaagatagagcctcatactacatttagtggggataagataacatatgaaggtatggaacagacaagtaaacaatggaaaagaatagatacttatggacctaagttagttgagaatattgttcaagctacagctagagattgcttaagagaggctatgtttaatgtgacagatgcaggttatagcattgtaatgcatgtacatgatgagcttgtaattgatgtagataaaaaaggaggttctttagaagaagttaacagtattatgggaaaagaaatatcttgggctaaaggtcttcctcttaaagcagatggatatgaatgtgattattataagaaagactaggtgattgatttatggatataaaggccagtgaaattgaacacataaatgtaagacatgatggccaactcatgctggccataggaaaaaataaattagaaacacattggaaaaataaaagtattttatggtccgaacttgtaaatagattaagtaaaacattaagaactcaagaaacatatacagaatataggaagatgtcaaagactgaaaaagatagagttaaagatgttggtggatttgtaggtggaagcttaaaaaatggaagacgaaaagcagagaatattgcaaatagaagtattataactttagatatagattatgcgaataaagatatatgggaggatataacattattaaatgattatgcttgtcttatgtattctacgcactcacatactgagaataatcccagatatagacttgtaatacctttaactagaccagtactaccagaagaatatcaagcaatttccaggatgatagcagatactataggaatagatatgtttgatgatactacatatcaacctcatagacttatgtattttccaagtacttcaattgatggagactatatatttaaatttcaagatggagagtttttaaacccaaatgaaatactagatttatatttagactggacagatgtaagctattggccagaaagttcgagggagaggcaaaagtttaatacacaattaaaaaaacaacaagaccctattgaaaaggctggaattataggtgcattttgcaggtcctatagtataaaagaaactatagaaaatttcttaaatgaagtatatattcctggtattgatgaaaccaggtatacatattcagaaggtagtacaagtggtggagtagttatttatgatgacaagttttcatatagtcatcatggtacagacccagcaagcggaattttatgcaatgcttttgatttagttaggatacataaatttggtgaacttgatgaagatgctaaacccgaaacgcctgtaaatagattaccttcatttactcgaatgagcgaatttgcaagcagtgacactaaagtacgaaagactataggaagagaaaaccttgataaagctaaggatgattttggtgatatagattttgaagatgatgaatggttaactaggttagattatgacaataagggaagttataagaaaacaacaaacaatatcttaatgtttatagaaaatgacccatatttgaaaggaaaaatagcttataatgaattttcaaatagagctgtcgttttaggtaagttaccttggagaaaagatgataaattaaatgattggaatgatagtgatgattctgggcttagacatcatatagaaacaatttacaatatctcatcaccatcaaaagtaaatgatgctctaataattgcttttgaaaataatacttttcatcctataaaagattatttaaattctttaaagtgggatggcattaagagagtggatacacttttaattgactatttaggtgcagaagataaccactatacaaggactataataagaaaagttttagtagcagcagtagcaagagtatttaatccaggaataaagtttgataatatgatggttttatctggtcctcaaggaatgggaaaaagtacttttattaaaaaacttggtggagactggtattctgatagtttaactactgtacaaggtaaagaagcgtatgaacaattacaaggagtatggttgctggaaatgggtgaaatgatggctactaaaaaagcagatattgaggcagttaagcattttctaagcaaatcagaggatatatatagggtcgcatatgggaagagaacatcaaggtttttacgtcaatgtgtagttataggaacaactaatgataaagaatttttaagagataagaccgggaatagaaggttttggccaatagatacaggagtaaagaaggttaacaagagtatatttaatggtcaacttgataatgaaagaaatcaaatttgggcagaagcagtagaattatgtaaagccaatgaacagctatatctatcagatgaggagaaaaaagaagctgaaagacaacaaagaactcactcagaagaaaatgctaaatctggaattatcgaagagtatctaaataaacctattactgagaattggtatgatttaagtatttcagaaaagagagaatatattcatggttcagattttggtgatttaaaagaaggaacaatattaagagaaaaaacgtgtgttatggagatatgggttgagctatttaatggagaacctaaacaactcacgcctatcttatcaagagaaattaatgatatattaaaaggattagatgattggatatcatataatggaaatttaaggtttgggaaaatatatggtaggcagagagcttatgtacgtaaaagttagtgtcaacagaattaaaaacagagtaaatttgaaaattttaaaagtgtcaacaatgtcaacaaaaaaaatggctttgttgacgcttatgttgacacctaagatgcagtaattacaatgtttgaggtattaatgtcaacaatgtcaacaaaaattaagtataaagtagtataagtaatattaggcatatacgtatatacatatgtatgcctaatatgtatatatacatatatatagaaaatctgttgacattgttgacacttaaattttaaggaagtgatattttgttagaatcaaaaatagaaaaaagacttaaaaaagagattgagttgttaggtggaaaggctatgaagtttatttcaccaggtgaggcaggtgtgccagataggattgtcttattaccagaaggacatgttatatttgtagaacttaaagcaccaggtaaaaaactaaggaagcttcaacaatataaaatgcgagaattaagagaattaggatttaaagttaagtgtgtaagcacattaaaagagatagatgattttatcaaggaggttaagggatggaatttaaaccacatccataccaagaatacacaattagaaaaactatagataataataatataggtttactattagatatgggattaggtaaaacagtctgtactctaacagctataagtgaattaatgtatgattactttgatatatcaaaagttttagttatagcacctttaagagttgcaagagatacctggagtagtgaagtaaaaaaatgggaacatctaaagcatctaaaagtatctaaagttcttggtagtaaattagatagagtgagagctttaagtacagactcagatatttatataataaatagagaaatggtaccctggatagtggatttttataaaagaaaatggccatttgatatggttgtgatagatgaacttagttcttttaaatcaaataaagcacaacgatttaaaagtttaaagaaagtattgcctttaactaaaagagtagttgggcttactggtacaccaacaccaaatagtttaatagacttatgggcacagatgtacttacttgatagaggtgaaagactaggtaaaactattacaggatataaagaacgatactttgagccaggacaaaaaaattatcaaacaggagctatatataattggcaacctaaaaatggagcagaaaatgcaatacataataaaataaaagatatttgtataagcttaaaagcagaagattatttgaatatgcctagaaaaatagataataaaattgaaatacaccttgatagtaaaatacttaaatattacaaagaattagaaaaagagaagatattagaattagatagagatataataacagcttcatcagcagctgtagcagcaaataaacttttacaattagctaatggagcaatttatgataatgataaaaatgtaaaggaactccatagagaaaaattagaagctttaaaagaaattatagatgtttcaaatggtaagcctattatagttttttataactataaacatgattataatcgtttaatgaaagagtttaagagtttgaaaccaagaacaatagaaaactcaaaagatatatatgattggaataatggaagaatacaattattactttgtcatccagcaagtacaggacatggacttaatttacaatcaggtggaagtataattgtttggtttggattaacttggagcttagaactgtatcaacaagctaatgcaaggctttatagacagggtcaaagggaaactgttattatccatcatctaatctgtaaaggtacaatagatgaacaagtaatggaagctatagagaataaggataaagggcaaagtgcattacttgaagcagtaaaagcaaaattaaaagaatatagggagtgaaggtatgaaagtaaaaagaaaagatggaacttataagcccaggtaaaatagtaagatgtgcttggtgtggtagaagattttataagttggataaatctaaagttgagtattgcagtagaagttgttcgaagagagcaagaaggagtgatttaagtggataaagaaagtataaaagaaattgtaagagagttaagaaaagaagaaagagaagataggaaaaaaggcgttttatataatactagattattgatgaagcattataatgattttaagagacatatagactcagcggtaagtgaagctaaagatgtagattacttagaggatgatttaggtaagcttgataatgaagagttgtatattttaagtataaagaaaagtaaagcaagaactattattatgatagcacatatagattcagcaatgaaaactttgaaattaagacaagagcgtttacattcttatgaaaagtatagagctttagagctttactattgtgatgaaaaaacatatgaagaaatagcagagatattaaattgtggagtagttacatcaagacgttggattaatgaaatggtaaaagaacttggagtgtatttatttggtatagatggcttgaaattaactgtttgataaatacatgataaaaagatgatattttaatgatatttaacccctgttataatggtagtatgaaacaagtgtataatatattcccccttgaaaaaggctaagttaccccaacttagtcttttttattttgtaaataaggagaatgataaatgagtaattcatgacttagagtgatttctaggtctttttttatacaattttaatctctcatattgaagggtcgaaaataagggtgttcaaattgaatattctttattaataactaatttaggaggtagtagtatgttgaaaattttacaagagaaaaatgtaaggatgatatggtcaaaaaatggagaagaagtttggtttaatgcaaatgacgtaggagaggaactaggcatagtaaatattcgtgatacattaagaaatatagatagagaatataaaaagaaatttaatgagtctactgtcggagattcctacactagaaactttaaagataaattgcctaactttggtactacttttgttacagaagaagctgtgtacaatatgtcatttagaagtaataaagcagaagcaaaactatttacgaagtgggttacaaaagcacttaaacaaattagaatacatggttactatattgccacagaaaaagatcaagaatggctggatataagaacagaaggtaaaaggtcagaaaagattttacagatgaaatacaagagtttttttattaatacaagtacttgaaagagttatatctatgaaattacctaggttgatagataaaggtatgaattataaagaggtatataaaaagattaaagaattaatcgaaatgatttaaatgactgtattaatagagggtctttttttttatgtaatgaattaaaaatgaaatatatttgtacattatagacaggaataaggtaaaagtattatttagacttattttgtggttgtcgaatgattattgaaggatattgactgattatatagaattatatcattataaatatttgtgaaaggaataatggtataatgagtaattttaaaaaaagatatattgatgtttatagaatagatattataaataaaattaatgggagtgtctattcagatgaagaaattttaaaagaggtaataaagaccttctttaaggataaagaatattgtaaagaaaacaaaaatggaattaatattactaaagataaaaagttttggattacagaagtaaaatgtagcgaggatgatttaataatcaaggtgaaacttgaatatactaaatacaatcagaatacaaatattataaatgctcatactaaagaagtagagggtaataaaaaaatggatcaaggagatagcaataagcagcacctatttattaaatttatgaaggaaaataatatagcagtagtattatttgaaagagtttttgtgggggttcccatgattgaactaagtaaaaacttacatctatattatgaggatatgattgaaaataataaatttgataataatatgtcaaaaacatcaattaatattacacaaatagcaagtaaagattttatagaacaaatattagatttagatggtgtttcaaaaataactttaaatgttgatagagagaagtttggaactgatgaagataatttgttttctaatttaaataattcaagacgacataacgatttgatatataagcccacatttagaactagatatttacctagtgaagttaaaagatgttgcgaaaaatatattaaaggagaggaatttagaaataaaaaaataaataggataataattgagggagagaaaaataagagaaaattaaagttggatactgagggtataaagttgtgtagagaaatagaggtttctcttgatatagataatcatatagatagtgaagacatttttgagaagatgaataatttgatagatgatttaattgagaataattcagttttttttaatttaatgtatcaagaagttgctatgagtgaagcatagattgctaaggaggtgttaaaatgtataaaaaggtattaaatatcttactcaattattacaaggctataaattctaaagaagtagtagagttagttttaacaccagtattaatatgtattatttcatacatgttttttaattcgtcaattaataaagaagttgtaatttctttaaacaaagatgtactaactttgtcaggactattagtagcttttggagtttgcattattacattattgtttactacatataacaaatcaatatcagaagcaaaagatataaaaacagaaagaaaggtaaatggatttaatatatcatactttcaattcatacagttaaaagcatattatactgtaataatggagattttggttgttgtaatatgttttatcaatacaataatgcttactcgatattattctaatataattttctatgttttaatattttttacagttcatataattttatctctaactacattaataataagtatgtttcatttatcctggaaggatagaggagactagatttgaaacaatcctattaaataggattgtttttttattcccaaaacaaacaaataaagaggtggtgatgtgcaagatgtcaaagaaaaggtaaaacaagattacttaaaaggaatgaaacaaaaggaaatatcagcaaagtatgacattagtttaaatactttaaagtcatggataaaaagatacaattggtctagtgaaaaaaagaagggtgcacctataaataaaaggggtgcacccttttctaataaaaattcagttggttatggtgctccaaaagagaataaaaatgctgaaaagtttggtttcttctcaaaatacttacctgaagaaactagggaattaatacaagaaatatctataaaagataaatttgatattctttgggaacagataacaattcaatacgcagcaataataagagcacagaagataatgtatgttaaagataaagaggaaatgattaaggaattaaagaaacatgaaatcacagaaaatagtgagaagatagagtatgaatttcaatttgcatgggataggcaagcatcttttcttaatgcacagagtagagctatgagtgagttaaggagtttaattaagcagtatgatgaaatgattcataaggattggaatttggctacagaggagcagaaaacaagagttgagaagttgaaatgtgaggttgctaacctaaataaagatgatattggagatgatgagttgaaaataagtgtagattatggtgatagaaatgatagttagaataaattttaatccagatttcaaggaagctaattttactaaaaaaagatacagagcaatgaaaggttcagcagggagtggaaaatctgttaatgtagcacaagactatatactaaagttaggagataagaagtatcaaggagctaatctattagtagttagaaagtcagaagctacacataagtattcaacgtatgcagagcttacaggagctataaatcgtatttatggtaaacaagctgataagtattggaaaactactttaaatcctttagaaattaagagtaaagttactggtaactctataattttcagaggagttaatgatgcaaaacaaagagaaaaattaaaatcaattaacttctcgaaaggaaaattaacatgggtttggtgtgaagaagctacagaacttatggaaagtgacatagatatactagatgaccgtttaagaggtattttaactaatcctaacttgtattatcaaatgacatttacatttaatccagtctcagctactcattggataaaaagaaagtattttgactataaaaatgatgatatatttactcatcatagtacttatctacaaaatagattcatagatgaagcttactacagaagaatgcaaatgagaaaagagcaagacccagaagggtacaaagtatatggtcttggagaatggggagaaactggtggagcaatacttaaaaattatgttatacatgaatttcccacagaatttgaatactttgacaatatgagactgtcacaagactttggctttaatcatgcaaatgcaatacttagaattggctttaaggatggagagttatatatatgtaatgaaatatatgtacatgaaatggatacctcagaaatcataaaaattgcaaatagtagaggtttagaaaagactctatttatgtactgtgatagtgctgaaccagatagaattaagatgtggaagagtgcaggatataaagctaaaggagttaaaaaaggaccaggaagtgttaaagctcaaatagattatttgaaacaattaagaatacatgtacatcctagttgcactaataccataaaagaaatacaacaatggaaatggaaacaagacgaaagaactggattatatcttgatgaaccagttgagtttatggatgatgcaatggctgctcttagatattctatagataataagcttaaaaataatggaataagcttcttaaagtaaaggaggtgttaaatatttatataagtgaaacagatttaataaaagttcagttaaaaaaagagagcacctttaacctagtaaaagtcatagaacactacatcttaaagcataggccagaaaaatataaacaaggagaagaatactattatggtaatactgatgtaaacaataagagaagatattatctcttagatggagctaaggttgatgattttactaaagttaataataaagcaattaacaactaccataagcttttagttgaccaaaaggtaggctatagtgtcggaaatcccatagtatttaatgcagatgatgataatctcactaagcttttaaatgacttactaggagaagagtttgacgatacaataacagaactatatctcaatgctagtaataaaggggttgaatggttacatccatatattaatagaaaaggtgagtttaaatatgtaataattccagctgaagaagcaattcctatttgggatagtaaaagacagagggaattagttgcatttattaggttttattatattgaagatatagatggaaataaaataaaaagagttgagtactacacagaaaatgacgtaacttactttattgaaagaggtaatagttttattcaagaatttttatatgatgaatatggaaaaatgactgatatacaagaaggtcattttagaataaataacaaagaacagggatggggtaaagttccatttataccttttaaaaataatgaaaagtgtgtctcagatttaactttctataagtctttaattgatatatatgataataacatttctacacttgcagacaatttagatgaaatgcaagaggtcatttatgtattaaaagagtatccaggaacaagtctacaagagtttatagataatataagatactataaatcaattaaagtagatggtggaggtggagttgataaactagagataaatataccagttgaagccaaaaaggagcttcttgatagattagaaaagaatataattatttttggtcaaggagttaatcccgaatctcaaaacacaggtgacaaatcgggtgtagctcttaaatttttatattcactacttgatttaaaatgttccaagactgaaaagaagtttaaaaaagcaattagagagcttttatggtttgtgtgtgagtatttaaagataagtggtagtaagagctatgattataagtcagttcaaataacatttaatcattctatgataataaatgagtctgaaaaaatagatatggcttctaaatcaattggaattatatcagatgaaactattgttagtaatcatccttgggttgaagatgttaatgacgaacttgaaagacttaaaaaacaggaagaaacccaaaaagaatatgatgatttaattcctactaataatcaagagggtgttatagatgaaacataaagattattggaggaaaagatttgaacaattagaagaagttcaaaacaataaaagtgtaaaatattatcttgaattggaaaagaaatacaaattagctatgaatagtatagaaaaagatatattatcatggtataacagatttgctgaaaatgaaggaatatctttattagaagctaagaaactgttaaatacaagagaattagaagaatttaagtggaatgtagaagagtatattaaatatggcaaagaaaatgctataaatcaaaagtggatgaaggagttagaaaatgctagtgcaagacttcatataacaaggcttgaagctttaaagttacaaatacagcaacacgtagaagttttatatggaaatgaacttgatggtattgataaactaatgagagatatttatacaagtggatactatcatacagcttttaatgttcaacaaggagtaaacgttggttggagtttaatgagtcttgatactaatagaataaataaaattatctctaaaccatgggcaacagatggattaaactttagtgaaagaatttggggtaagcatagacctactttaataaatgaactacatactaagctaactcaatcaattattagaggtgaaaatccaaaaaatctagtaaatgactttgctaagagatttaatgtatctaaatcacaagctaagaatttgataatgactgaatcagctttctttgcatcagcaagtagaaaagattgttttagtgatttagatgtagagaaatatgagattattgctacattagatttaagaacttcaaatatatgcagagagttagatggaaaaatatttgatatgaaagattatcaagttggaataacagctccaccatttcattgtcgttgtaggacaacaacagctccttggttcgaggatgaagaaggctatagagcagcaagaggagaagatggaaaaacatattatgtaccatctagtatgaagtataatgagtggtatgagaaacatatagagggtagacttggaaaagaaaaagctgacacccttagaaaaatgcaactaaatgagagtaaagatagaaaacaatttgaagaatataaaaaggtattaggaaatgaaataccttctaaatttgatgaatatcaacatatgaagtataatgatactataaggtatgaggaagctaaaaagctttataaggatgtaaattggcaagttaagaatcagagaaatttaactagtggaagtgttcattcagtgccatttgaatcaaaaccaaatagtgtatttgataattacaaagatggtaaattaattcaaagaagatactatggtaatacaggaaaacctagattagatttagacttaactgaccatagaaacccaaagcaacataaaattgtacctcataaacatgattggttagctgatgaaaataaccatgataaggtaaaaagagagaaggatatggagcttacaaaagctcataaaatagctaacaaagatattttgaatggagaataaaatggataataaatttaagaatttacaacatttaattgattctattgatttaggattagatatagaatttgacttatataataaaccatataatatatctattggagatgatgatacaaggtttattactctttgccctaatggagatacaaagtattataaaaatggtaaggatatggttgataattacaacattgatggtaaattactaaaggatttatggaaagatatacaaatagtaaatatgtaaaagcacttgctaaataataaattagtaggtgcttttattttgtaaaaaatgaaaggagaaatttaaaatggattggttaaaagaattgctagaaggaataaaagtagaggataacaaaattgatgtagcttctcttcaaaaatctatagaaaagaaaataaaggagactacagttactcaagaagattatgtaaatcttgaaacacaacttaatacagctaatgaaactattaaaaagtttgaaggaggtatgacaaaagaagatgtagagaatctaaaaacaacttatgaaactgataagaaaactttggaagaaacctacaaaaaagaaattgaagaaaaagattttaattactggttaggtgatgcttttaaatctgttaaatgtagagatgaaatagcgttaaaagctcatttagacatggaagccctaagaaatagtaaagatagacaaaaagcttttgaagagcaaataaaccctttgaaacaggataaagattatttgtttaatgcaacactagaaggtgaagaacctaaaatagatactataacaccagggcaagagcctaagataaatgattttggttttaattttactggggtaagacctcatgaaaataataataaataggaggaaataaaatggcagcactaaattatgcaaaagaatattcaaatgttttagcacaagcatatccttatactttaaacttcggggatttgtatgcaacagaaaataatggaagatatagatggacgggttctaaaacaatagaaataccaactatatctacaactggaagggtagattcaaacagagatacaatagcagtagctcaaagaaactatgataatgcttgggaacctaaggtattaactaatcaaaggaaatggtcaacattggttcatccagcagatataaaccaaactaattatgtggcttcaataggtaatataacaaaagtatataatgaggaacaaaagtttccagagatggatgcttactgtatatctaaaatatatgctgattggaccgcattaggtaacacagcagatacaactgttcttacaacagcaaacgtattagaagtatttgataagttaatggaaaaaatgacagaagctagagtacctgaaaatggaagaatattgtatgttactccagtagtaaatacacttatcaaaaatgcaaaagagatacaaagaacagtaaacataaaagatggtggaacttctttaaatagacaaaccacagatattgacacagttaaaataattaaagtaccatctaatctaatgaaaactgcatatgattttacaactggatggaaagtaggagcaggagctaaacaaatctttatgtccttagttcacccaagtgcaataattacacctgtttcttatcagttctctaagttagacgaaccaacagcagttacagagggaaaatacttctactttgaagaaagttttgaggatgtatttatattaaataaaaaagctgatgcaatacaatttgttgttgaagcatagaaaaaggagtgatatatagtgccacaagtaaaaaaactaaatagaatactaaccatagaagaatgtaaaatagatgatttcttagagatgggatatgatttgatagatgaaactggtaaggcagtaaagtatggcaagtcattaagtgtaaaagatttaatagctgaaaataatattttaaggtcaaaagttgagtctttagaagaagaaaataagcagcttaaagagaaaaataaacttactaaaaagtaggtgaaaattatggaaaataatataattgatgaaatagaaaaaagacttgaaagttttggatatatattaaaagatggagataagtggttaataggttttgtaagagaaaaaatagaaaatattattaaactagattgtaatataaaaactatgccaattgaattgaaagaaattgaagttgatatgatagttggagagttcttatttaccaagaaaaatatgggtcaattagatatagaaagcattaactttgaagctgtagaaaagtctatatcagaaggtgatacaaaggtagattttgctataggaagtggttctcaaacaccagaacaacgctttgatagcttaatagcttatcttactacttatggtaagaataagatattaacctttaggtgcttaagatggtaagtaaaactagaaaagcaatagaaatgttatatagagataaatgtactatagttgagtatcagccaattaaagaccctgtaacaaaacgaactaacaataaagaagtgattgtattagaaaatcaaccatgtaaactttcatataaaaatatagtttctgctacagaagggaaattagctaagctagagcaaactattaaactctttatatctccagatatagaaattaaagcaggttcaaaacttattataaatgataaagagtatgtaagaagtggagaatcagctatatatccaaatcatcaagaaataatacttgagttatttaaggataaagcataatggctagatggggcagtgttgattttagagagtttaaaagagtttgtaaaaagatggagaaatttacaaagattgatttagataagttttgcaaggatgcagcaagagaattagcagcaagactcttaggaaaagtaattagaaggacaccagttgatacaggatttttgagagagggttggagtggagtagcttatgctaggtcgcttcctgtttacaaacaaggtaataattatattatagaagttgttaatccaactgaatatgccttaacacaatggggcatataaaacccagcaaaatcggtaaacgctaagtgtaatagtgttacattataaagtaggtagaatatggacatagaataactcttgatttataatgtataaaagaggtgattttatggcaaaatttttagatattacaggaaaaaaatttggaaggctaagagtcattaaattttctaaagagataaaaagcggtaaaagaaataggaaatattggttatgtaagtgtgattgtggaaatttcaaagaaataagaactgactctttaactagtggcttagtgcaatcttgtggatgtttaaaaaaagaacaagataaattaaatttaacagacaaataccaatttaaaaagaaatataaggttcaaaataaaagactttacagtatatggaagggtataatatctagatgtacagataaaaataataaaagatacaatagatatggtgaaaggaatataattgtgtgtgatgaatggttttgctatgataattttgcaaattgggcattgagtaatggatattcagagaaacttacaattgatagaataaataatgaaggaaattatgaatcaagcaattgtagatgggtggatataaagacacaatgtagaaataggtcaacaaatatattagtaaaacatgaagaaaaagaaattacattgatagagctttctgaaaaaacaggtatttcatactcttgcttaagaagtagatattctaagggattagtaggaaataagcttatagaaaaagttaagattattgaagaaagcagagctaagttatctattgaggatgtaaaagaaattagaaaaaagtattctgatggatatacaataaaacaactaagtgaaatatatcctgtaacatattcatctatatcaaatatagtccatagaagaacatggaaaaatatttaattaattatatatgccaataccgaggaaaacctatagattgcggataggctataggtttccgtagagcgtagagagtgaataaatataatctctccaagagtgctgggcaactaaataaagtttattttgttgatgatgtacgccgaacttataggaaactataagagctagaggataaaaagcctttaggataacaaaatgcatatgttgaatttggtcatagaactaaaaatggcaagggttgggttaaaggacaacatttcttaactatttcagaaatggaactacaaagtcaagttgataagataatagagaaaaaactattaatattgcttaaaggagtgtttgatgcttaataatattatagatggaatatcagtaaagttagataaatcgtttggagaaaaatatacaatttatagcgaagatgtggagcaaggtattaatgaaccttgtttttttattgttcctttaaatccaagcaagacaccatatccaagcgggagagaattaaagaaaaattcttttgatgtacattatttccctcgttcagaagataagaattttgaaataaatgagatagctgagatgctactggaggaattagagtatatagaaattgatggagatttagtaagaggtacaaatatgaattttgaaattatagacaatgttcttcacttctttgttgattataactattttactataaaaaataatgataccaataagatggatacagtagagttattcggtggtttgaagagaggtgataattttgagtaaagcattaagcaaagaagataactacaagtttactaaggagcagatagttaactctaagaagtatgtaaatagaaaagatttattaaatgcaattttaaaagaaaatgagttatattccttctcagaggtagaggatagaataaataaatttatgaaaggagtgagttagatggctttaggtggaggaacattcgtaacgcaaaataaaatacttcctggtgcatatataaattttatctcagctaagagggcaaccagttcattatcagatagaggtattgttgcaatgcctttagagttagattggggcatagatgaagaagcattccaagtaaccagtgatgattttgagaagtattcagtgaagtattttggatatgattatactcatgagaagctgaaaggtttgagagatttattcaaaaatataaggttgggatatttttataaattaaataaaggcgttaaagccagttgtactatagccacagcaaaatatagtggtataagaggaaatgacttaaaagtaacagttacaacaaatatagatgataatgctaagtttgatgttgtaatacttttagataataagaaggtagatactcaaatagcaaaggttattacagacttacaagacaatgactatatcacttggaagaaggatgcaacactagaagcaagtgcaggacttgtatttactggtggaaccaatggcgaagctgtgacaggagcagagtaccaagctttcttggataaaatagaaagttattcatttaatgcactagggtgtttggctacaacaacagaaattaaaagtttatttgtagaatttacaaagagaatgagagataaggtaggagctaagtttcaaacagtactatataagaaaagtgatgcagattatgaaggtgtagtgtctatagaaaataagattaaagataaagatttagttgaatctagcttgatttattgggctactggagctatagcaggatgcgatataaataaatctaatactaataaaaagtatgatggtgagtttgatgttgatgttaattatacacaaatacaacttgaagaagctttaaaaactggtaaatttatattccacaaggtgggagatgaagttcatgtgttagaggatataaatacttttgtatcatttacagatgataaaaatgacgatttttcaagtaaccaaagtgttagagtacttgaccaaattgctaatgatattgcaactttatttaatgaaaagtatttaggtaaagttccgaatgataaggcaggaagaataagtttctggaatgatgttgttaaacaccataaagaattagagaatataagggcaatagaagattttaaaactgatgatgttagtgtagagcttggaaatgataagaaaactgtcatagtatctgatgctattaaggtaataaatgctatgagtaagctttatatgactgtttcagttaattagagaggagagtgataatatggctcaaacaataaatgctaaagatacagttagtgcaaagaaagctgaatgttttataactatagaaggtaaaagatataattttatgcaagctatagatttagaggctaaaatggaaaaaaataaaagtgaagttccaattctaggaagaacaacaaagggaaataaaacaactgggagtacaaatactggaagtgcaacatttcattataatacttctatttttagagaattactttacagatataaagaaactggtgaggatatttattttgacatacaagttacaaatgaagaccctacatctgctgtaggaagacagacagtagtacttaaagattgtaatatggacagtggaataattactaaatttgatgctgatggtgagtatttagatgaagatatggatttcacttttgaggattgggaattagttgaatcctttgcattacttaatggaatgttataaaattgaattatacttgaaaaatattatgatgtaagtataaattatttggaggtatttcatggaatttgaaagtggaattaaattaggcaaacttactttaattaaatatttagggagaaataaacatagtaaaaaagtctggctatgtcaatgtgagtgtgggaataaagttgagagagtagaaaataatttaaagcaatcaattaaaaatgagaagcctccacattgtggttgttctccaaactggaaaggacaaaataagagatttaaagatataactgggaaaacttttgggaagcttacagtattgaaaatgtctgggaaagataaatatagtcacaatttatggttatgtcaatgtgaatgtggaaatagaacaataactagtacaagtgcattagaacaaggaaaagcacaaagttgtggctgtataagaaaggaaatattactagagcgctctacaacgcataataaatctaatgatagcttatatagagtttatcaccgtatgattaaaaggtgcacaaataagagtaataaagattataattattatggaggtagaggcatagaagtatgcaatgaatggctagaggattttataaatttttataactggtctatagaaaatggatatagaaaaggtttaacaatagatagaattaatgtgaatggaaattacgaaccatcaaattgtagatgggttacttgggaagttcaacgaaataataaaagaaatagtattagagttaattataaaggtgaaatgattactttaaaacaatgtgcagaaaatttgaatgttaagtatctatttctttataatcaattagttactaaaaaaattccattggaagaagtaataaaaaatataggtatggagtaaaatacacatttataagttataaatgtgtattttttatatgaaaaattaaaataaaaggagattagaataatatgagtaatttaagtgcttttttaagtcaaaatgcaataaaggttgataatgtaaaatatgtagcgagtaacagatttttagataaagaagggaaaccagttgaatgggaattaaaagttttatcatctgaagaagacgaagcactaagaagaaagtgtactaaaagagtaaaagtgattggtaacaatggtaagcatactggacaatatacaagtgaaattgactacaatagttatgtagctgaattatgtgtagcatctacagtatttccagatttaaaggatgccgaactccaaaatagttatggagtaatgggagaagctcagttattaaagacaatgcttacagcaggtgagtatgtcaattatacagtaaaagtgaatgaagtcaatggatttgatacatcttttgaggataaagtagaagaagcaaaaaactaatcagaggtggcgattttgatgctagcatcactcattattgtattcaaaaattaaagtggaagccaagtgaatatatgaatttagaagttaatgagagagcgttagcagccgcctcaatacttataaagatagaagatgaagaggaagcaatgaaagaagctgaaagagagagaaagaggggacgaagaagatagcaaaataaaaaaataaatatagaataggtaaaatatgtaataattatatgttataatatttttagcaagaagatgtaatctacaatttatagagtggagttcatactgggataaaacctacttcctaatgaaaggaggtgggaagtatgaataactttttacttaatgtaatagctggcgttattgctagtttaatattttgcttaatttgtaaagtatttctaaaagtaaaaagccactcaactcgtggcaagagtaaaagtggctgggaatttgattttaaaatcaagttccacaaatttaaataattactaattgtttaaattatgaacttcactctactgtcaaatagattgtagttcttcttgcttttattataccacaaattagaaaaaatattgtttatataaaataaaaaataaaaatttttattaaaaaaatgaaaacttgattataaagcaattaatttataaaatatatataaataagtaggtatttatttacttgaatttcattgtttatataaaaaaaatggaaaaatatgtaataattataggttataataattgtagcaaggataataatcgaaagtgcgaagggtgattattttcatattaaacgccaaattccaaataaggaaggaggtgaaattatatgataggttttttattaagcatactagctggtgttatatcagcttatatttatgacaaaataaaaaatcacccagacgccaataagggtgatttaaaaaaataatattttcacttaacaactgaaaataatcactctttgtaggaataaattatttccttgcttttattataccacaaattggtacagatattcaaaaataatatttttatgatataataaaaatgtagagattttgcagtgagcgatatttgtgataaattgaagtttaacagttgcaatataaggcgttgagggtgtgtgataaatgttatcaattgcactactcatggttcactgcaaatttaagagagttgtatatgtgtaggtattgaaaatactcaacttattttggggttttagattaactatatggaatgtaaatgttgtaagaagtatcattctattttttaatctttctgttttagattaactatatggaatgtaaatttcagtgagaataagctttattgtcgatgtaacactcgttttagattaactatatggaatgtaaatagtacatataatgagtctttaacatcagttatgaaaggttttagattaactatatggaatgtaaatgattgtactttagcgtctgcactagctttgtctatcgttttagattaactatatggaatgtaaattattttacagatgaacaattacagttacttcttgaatgttttatattaactatgtggattcaaaattaaatagaaaaaagaaagcacttacttaaatagtaggtgcttttgttttgctcaaattacttaattataaagttgctaagtacaactttttagaattatacaatataaaaatgcactaaagtgattgattttgctcaagttggtcggttgagtaaaataattagaaaaaaatgttaaaaaactcttgaaaagtgtcgcgatacaatgtataattatattatcgcgatacagaaaagaggtgaaaattattactgatagcagtagagcagattacttcaagcagagacgacagaataaaaaaacttttagtgttctactagatagagagaaagtagagaaaattgaagaacatttaaaaaagcagaacaagactaaaactatttggcttgaagaaaagattaatgaagagctagaaaaagaggaataaaaaataagagacgttctccccgaccaaagattgaacatcccttattgacgtatattatatacactaactatagtatacgtcattccttgaaaaaattcaattaaggagtgtaatagttatgaaaaatttaatagtaaaagagttcaatggaagtcaaatttatacttttatgtggaaagaaaaatcttgttggatagctaatcaaatagttggattattcgattatgctgatgtatctaaaacaatacaggattgcataaaagcagaagactttgagattgaacaagagtatgatgtattgaaaggaaatgaatttaatgattttgtaactactttaaatgtagtcgcaaataatataattagtaataaagctagaagtataactattttttatgaagatggtttatatggatttttacaatacacagacaaacctattggtgtacagtttaggaaatggcttagacgagaagttttaccaagcataagacaaactggtgcatacataactaacaatgctaatcccgaaaaactaagagaaaaagcaagtgagattgagaaattacagttagcttacaatagtacatctatgttaaaagaactattagatggtgcaggctttgacaataaatccaaactattaacagctaaaacattatataagaaagcaggaattgatttaccaatagagataaacgaagaagaacattattttgatacaaagcaaatagcatctaaactgaaaatatattctaagagtaataaaccagcacagttggctgtttgtgaaattattaaaaagattgatttagaagaaaacgaagtcaaaggcgtttgggaaactaatggttcttggactggtactgtaaataaatatacaaagagtgtaatagataaggttagaaattggatagaggaaaataatagacctactaagattgcaggtgaaaagaagaattatcatgtggtttataagattgagtaaatttataagattgtattaaataatttagtttagttttggggggattaatacaatgcatgagaatttacttgatagtatagatattgaaaagagaaaagaagaatttagaattaaacttttgaaaataagagaaacagatatagatatatataataagatagaaagtatagtatataaactttcttagaaaaaattagagaaaaataattaaataaatagataaagcacttggatatttcactgtttcaagtgctttatatggtaaaaaatggtataataaaatataggaattttgcagtgttcgatttttctactcaagtatagtttaacaattggaatacaaggcattgagaaggtttgataagtgttatcaattgcactattacccgctcactgcaaatttgagaaagttatatgtgtgtaagtcttggaaatacacaatttattttggggttttatattaactatatggaatgtaaatctttgtaatggtagtgtatttaagattgaaacatcaagttttatattaactatatggaatgtaaatcaacattagtagttgtctttatacacatagcatcacgttttatattaactatatggaatgtaaatacagctcccaagacatacaacgaatctgtaacatcagtgttttatattaactatgtggtatgtaaaagacttatttacagctttatttgctaaatcagaaggttttatattaactatgtggacttaaaattaaaaataattaaaaaacacttactaatgtaggtgtttttttattgaaaggaagtgattataatgtaaaaattttgaagatatagtataatattcttataaaatataatttagggggatattatgagagaaggaaagagaagaagaggatgtctattttggtttattcttattattttattttctggagttgttggagcaatagcagggaacagtactaataatgaaagcactgaaaaacagaaagaggatttaactaaatatattggtgaagaaggtagtataggagatttaaaattaactgttaatagcatttcaaaagctagtgaaatatcagtagcatctggttatttagcatacactccagatagtggcaaatatggtattataaatttaacaataaaaaatcaaactaaggaaagccaatcttttatgctaaattcattcacattaataggaccagatgattcaaaatatgttccatctttattgattgatgtaggaaataaatatataactatggatactgtaaatcctaatttagatgtaacaggtaatattgcatttgaaattcctaaggatttactagtttctgattgtaaactaaaatatagtggttcagagcaagaatttatattaaaagaaaaataatatatagatttaaaaatatgaagcatttactttaaataagtaagtgcttttttaattaaaaggaggtgataataatgtaaaaattttacttatatagtataattacattataaaattattgtactggggggaatcttatggggttatttggaaagaaaaaagcagatatatgttgtatttgtaatactgagataggagtactgaatattgaagatggttggatatgcaattcttgttttaaagaatattgtgatgcactttctatgactaaagcacctaaaattttaagaaaattagatattgaaaagactatatcatcaactaaaaaaaataatgaacttcaaaaaatatttaatacaactaataatatagaaaactatatagaatttgatgaagataataaaaaatggcttgtgtctaaaaaaagtataaacgataaaaaaactcctatcattcattcttatgaagatatcgtgaaatttgaacttcttgaaaatggtgaaactgtaactaaaggaggaataggaagagctttagcgggaggaattttatttggagaagcaggagctatagttggagggataacaggtaaaaaaacaacaagaaaagttgttgatacatttaaaattaaaataacaattaataatattgataatcctattgagtatatcgaattaattaataaaaaaacaaaaactaattctagtgcttatgagaaagcttacaaagatgcccataaaattttatcaacattatctgctattacacaaagcattaaagagacagacaatataaatactaaatctgtagcagatgagatattaaaatataagaatcttttggatatggaagctattacacaagatgaatttaatactaagaaaaaagaattattgaatttgtaatataataaacacttactaatgtaggtgtttttttatatggaaatttatgaaaggagagtgagaaagtggcaacgatacaaacttcaataaagattttcgacggaatgacacctgcttttaggaatatgactacatctattaatacgacaattaatagccttgaaaggttacaacaaagattgcataatccgcttaacacaggtgggatacaagcatctcaacaaagtttaaacaatattgaaaacatattaaccaggatagaacagaaaattggaagaaatacaaatgaacaagaaaactttaataataagataaagcaaggaagtgaagcaggttctctattagtatctaaactcaaaagtttggctggcatatatattggaataagaggtatagaaagtattacaaaagcagcagatacaattgcaagtacaaaagcacgtttaaatttaatgaatgatggattacagacaacagaacaacttaataagatgatttatttatctgctcaaagtgcaagagctagttatgcagatacggcagcacaagtcgctaaacttggaatattagcaggagatgcttttggaagttcggcagaggtgataaagtttacagaacttatgaataaagcttttgtaattggaggaacatcagcaaatgaagctagtgcggctatgtatcagcttactcaagctatgggtgcagggaaacttcaaggtgatgaatttcgctctataatggaaaatgcacctttattagccactaaaatagctgatgcaatgggaaaaactaaagaccaattaaaggaattgtcaagtagtggagcaataacagcagatgttataagaaatgcactatttaaagcttctgatgagatagaaaagaaattcgcaagtatgccagtcacttttagtcaagcacttactatgatgaaaaatgacgcctacatgatttttgggcaaaccctcggaaagataagtggagcattgcaaagcgttagatttagtgaaattgttgtatctataagaaatgttatgattgcaatatcttcaaacatttacgatacattaaatattataaaaaatattttaaatagtgaattcttttcaaacttagtgcaaggatttacattttgtgcggtagtaataactaaaagcttaggttctattgtaaatactgcattaaatatagttaatatatttgcacaaaattggagtataataaaacctattgtatttggtgtagcttctgtttttatattgtttagaggggttttgctagcgactaaaatagctacaataggtaacgtaattgcgaatgttgctcacgctgcttcctcttcactatcagcacttatgactaatatacaagcagcagcactgatgcgttcgaatggagctactttatcagcaacaatagccacttggggtttaaatgcagctttattagcttgtccaatcacatgggtagtattaggtattctagcatttgtagtagtagtttttgttgcagtagcagcagtaaacaaattcgcaggtacaagtttaactgccttaggagtaattgtgggtgctgtatttgcagcagtggcagcaatacaaaatgttatgatttggttattaaatggctgtatagctgtaaatgaaggcattacaaatggttggaatcaatgtgtatatctaatgaaacaagctattgcaaaaggtgtaatctttataatcgagaaaatggcatctctaaataattctgtaaataatgctggaaatgcacttgggaaagctttcatagatggggcaaatatcgcaatacgaggtgtaaacaaattaattgacctaataaataaaataccagggataaatattggtaaagtaggagaggcaacgtttacgccagttaaggcagataatagttacatcaaacaacagattgatagcttaaacagatgggtaggagacgcaccagagaaagtaaaattggagcgaatgggatacaaagatattggagcagcatttcaaaaaggaaatgcacttggaactaaatggcaaaatgctataactgataaatttaaagatacttttgacattaataagatgctagaagatgcaaagaaaaaattaggattagacgatttgtggaataaacaaaatcctttaaacaaccttggtggatttggtggagatttaggaaaaaatgtaaaggacacggcaggcaatactgcaaagatggcaaagactatggataaaagtcaagaggacttaaaatacttaagagatatagcagagcaagaaacaatcaatcgattcacaggagtaaacattaaaatagatatgaacaatacaaacaacataagtaaagatacagatgttgatggaatagttaatgtcttaactgaaaaactgaacgatgctatggttgtatcagcggaaggaatagtttaggaaggagagtgagaaaatggcttatgatttttacctagatggagtacaactaccaatcgcaccacccaagcttgaagtcaaagtgacaaacaagaacaagacagttgatttgataaatactggagaagtaaacatattaaaaaaagaaggattatctgaaataagttttgaagcagaatttacacataataaactacctttttgtagaggtcaatttagagatgttcaattctttttaagtaagctagaattactaaaaactgattgtaagccatttcaatttattgtatctcgtgagttaggtaacaaggtcttatttaacactaatataaaagtatctcttgaagagtatgctatttcagaagatgcagataatggctcagatacaaaagttgcaataaaattaaagcaatatagagattactcaactaaaaagttagttcttgcccctcctaaaaatgagactggtagacctaatgtaaagatagagccaaaacgagttgattcagtcaatgccacaaacactaaaacatatacagtaaaagcaggggatagcctttggtcaatttgtcagaaacaacttggtaatggttcattatataagaaagtatacgaactaaataaatctatgatggataaggcaaataagggcaaaaacttaagtaaatacactatttataaagggcaggtgttaaaacttggttgatgaattagtgttagcaaatgatagagatgtaagattagtaatagctcattgggaagatttctacgaacctgctgtcattgatggtatcacatgggagatagaaagacgaggtacaccttctaagttagagtttacaatagtcatggatgatatactagagttttgcgaaggaaattctgtaaggctgtattataaaggaataggcatattttatggatatatatttcaaaagaaaagagataaagaaaatcacattaaaattgttgcttacgaccagttgagatattttaagaataaagatacttatgtatatagtaataaaactgcaagtgaacttgtaaaaatcttggctaaagattttaatttaaaatacaatgtcatagaagatactaagtataaaatatctagagtcgaagaaaataaaacactctttgacatgatactaacagcactagatgatactttaagagagaaaaaagaaatgtataccttgtatgatgattttggaagaataacattaaagaatgttgcatcaatgaaactagatactgtcatgaacaatgatgtaattgaggattttgactataattcatcaatagatagtgatacttacacaaagattaaacttgtaagagacaacgaggagtcaggaaaaagggatgtatatattgctcaagactcagctcacatgagaagttggggaatacttcaaatgtttgatacagtagacaaaaacatgagtgaagcagagataaaacaaaagtgtgatatacttctaaaactatataataagaaaactaagtcattaagtttaaaaaatgcacttggagatattagagtgagagcaggttgtttagtacctgtttttttaaatctaggagatattgaattgcaaaattatatgttagttgagaaagtaaaacatacatttgaaaataattcacatttcatggatttgaccttggttgatggagacgaatttgcttcatattcttcaagctcatatagtagtggaaatactaataataaagatgaaaagaaaaatggtcctgcacaaagtattatgaaaaaaaatacaggtaaaaaagttcctgctatatttactgcatattatccaggaaacaatgcaatggaaggtggaaaaacagattgcaatggaaagccacttgatgtaaaatcaagaactgttgctggtccaatgaatcgagaaggagttaagaaaacttggtatactgatgattttctaaataaacatccagtttttgaatatggagataaagtaaaaattatacttcctggtactgcctatgacaacaaagtatatacagttaaagataatggaggaagaatatatgttgaaacaaacggaacatatcatatagatatactattagctaatgctagtgaatgtaaaaaatttggtagaaagaatggctatataattataggtggagatgaagaacaaacatatcaagttgaaggtaataaccaaagtaatacaaataacaattctaaagaagataaattaattagtatagcaaaaagtaaactgggttgtaattatgtgtatggagcagaaggtcctaataattttgattgcagtgggtttactcaatggtgttataaacaaataggtataaaaattcctcgtactgcttctgcacaaagtaaagcaggaaaagcagtagatttaaaagatagaagcaagtggaaagcaggagacttattatgtagaattggtggaggaagtagtaatcatgttgtaatgtacattggaaacaatcaaataattcattcaccacaaacaggagatgtggtaaaaatagagtctgttaattcttatagaaaaggaaaagcatacacacatgtgagaagatttatataagtgaggtggcaatatgagccaagatttattacagataataaaaaaagctgcaatggatgcagtagaaacaagcaacccaatgagggttgtatttggaacaatagaaagtattagtcctctaagagttaagatagaacaaaaactatctattggtgaaatttttctaatacaaacagatacatttaaaagatatacagataaaaaaatgggagataaattagtcttaattcgtatgcaaggagggcaacaatacttgattttagataggatgtgataaagtgttaccaagtgataatttagattatgatattgaagatgtatcaataattaattttgatgtaagacaagagccaagtaagacatttaaacttcatatagaaaagtctaagattgatggtatttgtgatgatgtagaagcattaaaacaaaccatttttttaattttaaatactgaaaggtatgagcatcttatttattctagaaattatggtgttgaattaaatgatttaattggagaacctatttcatatgtaatacccgaacttgaaagaaggataacagaagcactaattcaagatgataggattgaaaatatagataattttgagtttcaaaatataaagggtaaagtacaatgtagattttcagttcatacaaaatatggaaatataaaagcagagaaggtggtgagtgtataattgtttgagttaatgacatttgaaaatataattaaaagaatgttagatagtgtaccagatacttttgataaaagggaaggttctataatatataatgctcttgctcctgttgctatagaacttacagaaacatacattgctatggatgaattactagaccaaacattcgtagatactgctagttattattatttagagaagagatgtaaagaaaggggaataacaccacttgaagccactcatacgattgctaaaggagtttttaacatagatattccacttgattctaggtttaatctaggagaatataactatgtagcaattgagagaatatctgaaaaaacatataaaatgaaatgtgaaactactggacctgtatttgagttaggaaaactaatacctattgaatatatagatggtcttgaaactgctgaactaactgaaatcttgataaatggagaggatgaagagtcagaagatagtttaagacaaagatattatgatagcctaaattcacagagttttggcgggaatatacaaaactatagggatgaagttaacaaaatacaagatgttggaggagttaaagtttatccaacttgggatggaggtgggactgttaagttagtaataattaactctaattttaaagtgccaagtgaagaattagtaaacttagttcaagaagaaattgacccaattggacaccaaggagaaggcttaggattagcaccgattggacaccgagtcacagttgaaggagttacaagtacaactataaacatatcagcagaaataacatacaaaaatggctacacttgggagaatataaaatcaattgcagaagaagcaatagacgactatttaaatgaacttaacatgagttgggaagatgaagaaaacttaatagtccgtatatctcaaattgaaactagattacttagtattgatggagtattagacattgcaaatacaatgataaatgatgttaaatctaatctaacaatagatagtaacagcatagtagtgagaggtgaggtagttggataaagagattaatctaataaattacttgccacaaattctacaagataaagaagaatatataaaagtatttaatgtagaaaataaagaaataaaaacactacatgataaattaaaggacctatcaaatgaccagtttttagaggacctaactataagtggtataaaaagatgggaaaagataatgtctataactcctaaaagtaatgagagtttagaagatagaaggtttaggatttttagtaaatatataagtaaattaccttactcagagagatttttaaggaactggctagataatgtagttggagaaggcaattatgaattaactattaataatgctacttataacatacaccttgagagtgatgctagaaatcaagattggtttgaggaagttcattcttttgtaagtaatattaagccatgtaatatgactttagattacactagagtgcttataagcaaagacaattatatgaattttggtataacaaccctaatgggtcaagaaataactatatacccttggagtccaccagatatagaaacttatggagaaattgatgtattaactggcaatggagttggataccaagagataacaatattttaggaggtgatatattggctatagataaaagttattacactataattacagatgtaggaaaagcaaagatagcaaatgcaagtgtcacaggtaataaagtagggtttgtaaaaattcaacttggtgatggtggaggaagtgagtatactcctactgaaagtcagacagaacttaaaaatgtggtatgggaaggcaacatcggaaatacaaccacagatgaaactgcgccaaactgcataatattagagagtttaataccatcaagtgtaggtggatttatgataagagaaataggatatttagatgatgaaaataatctaattgcaatctctaaatataaagaatgttataaaccttctatagaacaaggagcagttgttgatatgaaggttaaaactgtgcttattgtatctaatataaataatatagaacttaaaattgaccctacaataatttttgctacgctcaaagatatacaggatttagatgctaaaataagcaatgtaaacactaaaattgatacaactaaaacagagttaacaagcaacatagaaactgctaagacagagttaaacactagaattgacacagaaaatgagaaacaaaatattaaaattgaccagctaatagcaggtggttcaaatgttgcatctactcaaacaataacaattgatgattggatagataatcaagaaggtggattcaaagcaactgtaacacatggtttattaacacagagaataactgtaagtattatagatgctactacaaaagataatgtagtacccgatttcacaattatagacgataattctattgaggttagaagtggagtaaaagttgagttaaatgtttatgtgattaatgggaatgcagagactcattttattaatgcgactgtagatgataatagagtgtctgaaatgactacttattcatcaaaaaagatacatgaagaaattggtaaggtagcagagcaactgacaggaattaatagtaatattatatcgactgtaaataacgacatactacctatatagaaaggagcgtgaaaaaatggcgttatcaatgagttattttaatttacctgacaaaagaaaatatactaaaaatcttgcatttaatccatttgcaggtggaaggcaaaattttgagtggactggtggtgaccatggactaaatggtgagtttaaagaaacttgcttaagttgcacttacaatggttcaacattaaattggggttcaggaaatgtttgggtcttgggggaatatggtcaatatacatttacttataattgtgaatcaatgcatgtggatacacaacaaaaatttccgtatacttctaatagaataataactataaaaggtagacctgtaatatctggttcagatacttcacttgggaataaaagaaaaggatttagtgtagattttactgtaagtgatgatactccaaatgttaatttaatagtacgtgcttatcttgatgataaattaatacaaaacattactcctgttgtacaaaattcaactttaacagcaacagtaacagatagtcaactaaactctttatccgtagatggaaatcacaaactaaaaatacaattaaatgatggatatgataattttgatagaatttttacttttaaaaaaatagaaaagggaattgatatatcaacatcattagtaactgatagccaagctaagtttactgtaacaaaaatatacagtgaattgacaaaaatagagtgttatttagatgaaacattaaaagagacttttactacagacttgtattcagaaaagactataaactatgaacttatagacaatgcaatacacacattaaaaatagttgtaactgatgcagaaaatgttgtagaagaaaaagttataagtataagtaagaatataatgccattgcaacctgatgcaacattacaagatatatcaactaagttaacagagattgggcaaggcgttagaaatggtaaaacaagcattataaatactttagcattaaagaatatagatgcaagtttaaataatacactcgttgagttatcagagaaaattaagggaggttttgatagtggagacgctagtttacaagatttgatgaatcaattaacacaagctaataatactatatcgcagttaaatactaagtataaagttgctagtggtacagttacttcttttgcggatagtactaaaattgcttatccatatctaaccgacaatgttactaaacctggttcttggattaaagttagtaatttaggctttaaacctaatattttctttgctgattttgattactatgatgctgaatataaaaataattataaacttttccttttcgcttgtaatggtgttgccacacaaagaggtgttgatttttcaagtgttacatcttttatcagaaaaagtggtgatgagtattttcatgctaatggatggctatatagtaactcagagggggatgtctattttaataatactggcgttcagattccagcttataactttgattcaactcaaaaacatacttataaatggtatgctattaaatttatttaaaaggaggaaaaaacatgaatgttccaaaccgaataatatatgaccaaacaggtagaacaatctttgaaacaggcgaatcctgtggagatgtattgccacattatacaataacggaattgcattatatagatattgaatatggaagtatagattatacaaggaatagagttataggtataaatatagaaacaaaagaaccgattttagaagaaataccagtatatataacagatgaggaaaagagaatacaagagttagaaaatcaattattaattgcagaaaatgagaaagtaggaggattattataatgaatataaataatgttgtagtaagaatattagcagaaagaatattaagtaagggattaaatcctctaaaaaatagagaatttcagttagatgacgtgactaacacagagtacagaaaagctgtagaggattatattataaaaaatagtggagtagtagaaggagcagaaccaactatatagagggttctttttttattgaaagaaggtgactaaatgacttttaaagagttggttaataaagttagaaatcttgtattagaagcaaagaatgtaactatagaagatacagaaagtaaatttacaagtgaaaatgtagaaggagcattgaaagaatgtatagatagagcagatgaggcttttcaagaagccgatagtggaaaaacacttttatcaactgctatcggctctcctactacatcagaacaaacatttcaagattatgcgaactatattacaggatttaagagcaatataagcaatttagaaactcaattgaaaagcaaatattctattagatatggtcctattgatggatatgatggtaatcctttttctgctaattttggcaagagtgcaagttaccttattgtctatgtttactttagaagaagtgtatattattataatcccagtggtagttctttaggaagtaatacaggaggttctgaacgtgcatggattactataaacagcaataaaactggtttttcagttcattcatatgatactagttatgagtcatatccttttacaggttattatattgcttgtttcgcataataaattatattattaaaactaggaggatgtatggaagaaattagcataaatctactatgtgcagtagcaggagttgtaatatcctacttagcatttagaaataactcaaacagaaagatacaagatgaaacagaaacaactacaaaattagaacaacaaataacttttttatgtgagaatgtaagagatataaagcatgatgtagcaaagtttaatactagtttcttagatattagtgaacgagttgcaaaaatagaagcaagtacaaaacaagcacatcttagaattgatgaaattgtaaatagaattggaggaaaataagagatggataatttaataagttttataccagagcagttgctaattttagtagctgctctctctattataggtaaaggttgtaaaaaatataaacaattagataataaatacattccagtagtgttactgatacttggaataggtttctcaatatggatgctaggattaaatcctgttgcagtcttacaaggtgtaatttgttggggagttgcaataggtataaatcaaacttacaaacagttgaaggatggtgaaaagtaatgaaattaacaaaaatattattactcacaaaaatttaaaaaatttcattaaatagagtatacttttatagctaataagtatataataatagtacagaactcgtaaagcatttatatgctcaaatatacgggacattgatttttgaaggaacccgccaagcttcttttatagctcaaataggcgggacagataaatttacccactaatattaattggtgggttttattatataaaagtatatctatgaaaaggtgaaaacaatggttgaagtaaaagaagaaaaaacatttgatgaacaaatagatattttaaaaagtagaggattaataataaatgataaagaagatgctaaatttgtattaagtaatgtcaattattataggtttacagcatatcttctaagttttaagaatgatgatggctcatataaagaaggaactacgtttgaagaagtttatgatatatataggtttaataaggaatttaggatattattaacagatttgttagggagcatagaaatagcatttaggacatacattgcatatacattagcaattaaacatggtgcttgtggatatctagaaagggagagtttcaaagatgaaaaattctatattaattttttgacagcattagagagagaaaaaagtaataattcagataagctttttattatacaccataaagaaaaatatgaaggaaaacttcccatttgggttgcaacggaaataatgacttttggtatgttgtcaaaattatattcaaacatgttgccagaagatactagatacataaaaaataatttgtgtagagtgaatactttattagttaaatcttggttacaatcattaacacaggtcagaaatcaatgcgctcattatggtagaatatataataataatttccgtattataacaataaaaaacgaatataaaaagtataacttggataataaaaagatattttcttatatacttgctatgaagcatttgactatggataaattaatttggaatagtttttttataaaacttcaaaagttaattaatgattataataattctatagacttaaagcttattggttttcctaataattggatagagatattggctaaataaaatagttactttaagaagtttataaacacttactatatgtaagtgtttttttattgaaaagaaggaggaaaataaataatgaaaatatgtattacagtaggacacagtattttaaaaagtggtgcatgcacttctgctgatggagtagttaacgaataccaatacaataaatctcttgcaccagtattagcagatacatttagaaaagagggtcataaggcagatgtaataatatgtcctgaaaagcagtttaaaactaaagcagaagaaaagacttataaaatacctagagttaatagtggaggatatgatttacttatagaactacatctaaatgcaagtgatggtcaaggaaaaggttcagaagttctatattatagtaataaaggtttagagtatgcaactagaatatgtaataagctaggtacagtatttagaaatagaagagctaaattagataaaggattatatatcttaaatagttcaaatcctacagcagtattaattgaaagtttcttctgtgataataaagaagattatgagaaagctaagaaactaggtcatgaaggtattgctaagttaattgtagaaggtgtattaaataaaaatataaataatgagggagttaaacagatgtacaaacatacaattgtttatgatggagaagttgacaaaatctctgcaactgtagttggttggggttataatgatgggaaaatactgatatgtgatataaaagattacgtgccaggtcagacgcaaaatctttatgtcattggtggtgcagcatgtgagaagattggttctatgactaaagaaaaatttactatgataaagggtaatgatagatttgatacactttataaggcattagattttattaatagatagattatataaaatattttagtatttcttgaaaatcataagtatggtaatatttagataaatattatttattattaataggtatggggggagattatgatatttaagaagtatataaaatcattactgatagttgttagtgttacattgataatgaacaaatcaatattatttgtaaatgcattagatttagagagtaacaataacataaaatcttataaaagaaagaatgtaaaggaaattgatataagcaataaatttgttgatgaatcctttagaagagatattgttgaaaaggtattagataatagggatgatccattaacaaatgaagttgcatcaaaagataactataaaatatatgaaagtgatttaaataaaattgagagttgcttagagttagatttacataaaaatccagatgtttctaatccaaacaaaatagataatttagatgggatagaaaattttagaaatctagaaaagcttgattgtagttcaaataatctagaaagtgtagatttaagtaaaaatataaaattaaaatatctagatattagtggaaataaaatattaaacattgatttaaaaaacaataatcttattaatgaattacattgtgatgcaaataaattatcaaatttagaccttaaaaataataaaaatttggtaagtttattttttactagtaatgaattaacagagatagatttaagtaataatgtgaacttagaaaatttacaatttcttaataataatttaaaaagtatagatttaagtcataataaaaagttgaaatctctaaattgtactaacaataaacttaaatcccttgatttaagtaataatgtttttttgaaaaatttaagttgttcaggtaataacctgagtaaattaaatataaaaggacttacaagtcttgagtatttgggatgtgctaagaataaattacaagatttagatgtatctacaaatataaaattagattctttactttgtgggaaaaatagtttaacaaaaatagatataagtaaaaataaagaattaaattcactggaatgtagtggtcaatatatagaaaaaagcattataaaaaatggtgaaaatatagttgtagatataggaattgaaaattcgaaattaaaggaattatatccacaaaattataatatttcaacaggttttctaacatgggaaaatctttctgactttccaaatagcataagttatagtttggaatatgaatatggtccagtaaatgatacagagactatggatgtaaatatatcaatagataaattagtgaaatgtagaatcagatatatagattatgatggaagtataattaatgaaaaagaaatatcagataattctagtataaatgaaattcaaattaatcctcaaagagaaaactatgagtttagtggttggaggaacaataaagatgaaaaaatatatacatcagagcaggtaagtaaattagtttttgatgatagtactgattttatagcaacttataaaagaaaatcaacaggatcaagtggttcttctggtggaacttcaagtaaagaagattttaatatagcaccatctaaggaaaaaataacaggtgcagacagaaatgaaacatcagtgaaaataagtcaaaaaggatggaataaagctgataatatagtgttaataaatgactctagcatatcggatgctttatcagcaacaccatttgctaagtctaaagatgcaccaatattacttactaaaaataataatttaaataaattaacagaaaaagaaataaatagattagaagcaaaaaatgtgtacatagtgggtggattaaagtctgttgatgaaaaagtagtgtctgatttaaagaaaaaaggattaaatgtaattagaatatctggaaatgatagatatgaaacatcaataaaacttgcaaaagaattagacaaaaattctaacctgtcaaaagtagtagtggtaaatggagaaaagggactagctgatgcagtaagtatgggagctatatcagcaaaagaggaaatgccaattcttcttactaatcaaaatgatgatatgaaagatataaaagacttaatagctaataaaaacatatcaaaatcatatgtaataggtggagaatctttatttaataataaagaagtgaataatacattaccatctgtaactaaaatagcaggttctgatagaacagaaactaactcaaaagtaataagtcatttctatagcaaagatacacttaatgacttatatgtagctaagaatggaatgaataaacaagacgatttagtagatgccttatcagtaggagtgcttgcaggtaaaactgaatctccagtagtattagttggaaatggattagatgatagccaaaaagagttaatcaagaataaaaagtttaaaaatataactcaaattggtggaaatggaaatgaaaaagcatttaatgaagtagaaaacttagttaaatagattgaaaggtagtaactggaaatagttactacctccttttttattcattttcagttttttcaataattatttttccatcctcaaaagtaacaagaacatccctttcatcaggagagatattcatctctttaatccatgacattggaagtatcaatctgggtgtaaaagagcctttgccacttttattaaatccaattctaagttttctttgctccaataatatcattcctttctactattaataaatgccagcaataataaagtaaataccaaagcaataagagctttaaaagtaaaacttattattatattaataatatttaaaactatagtgataccaagaataatcatacaaattctataaaatttattattcatattaaattagaaaatgtgttataatattagaaagaagctacctagaaggaaggtattttcctcctaggattgaaacttataattctttaatcaatcttagtattgcgagtactagattaattaaaactaatgtgaaagagaaagcatttttaattttattaaatttgttttctcttttattttttcttctttctaatctccccactttcttacctcctttctatatttatattatatcatcacgtgacgtgaaagtcaataaatattacatatttttcaataaagttatattgataaactatattttttacaaataaaaataaatggtgacaaaaccaaacttgccaccattttgccaccgaaaataaataatagaataaatttaaattaaacataataaaacataaacaacaaaactgaccttaataaaacattgaaataccaacacttgtaaaaaataacaacaataaacaaataacctagaataatattacaacttaagtaaataataattttgaataataatttacggaggtattcatatgtttaaacacgataaagcattattaaaagaagtaaaagtagaaagaccaaatcctcaatatgctgttttaatgcaagaacagttgggtggtgcaaatggagagttaaaagcagctatgcaatacttgtcccaaagttttagaataaaagaccctcaaataaaagatttatttcttgatatagcagcagaagagcttagccatatggaaatggtagcacaaactataaatttattaaatggacatgatgttgattataatgcagttaatacaggcgaaatagaaacacatgtattaactggtctatcaccagtcttaataaactcatcaggagctccttggactgctaattatgttacagttacaggggatttagtagctgacttactttcaaatatagcttctgaacaaagagctaaggtagtttatgagtacttgtatagacaaatagatgataaatatgtaaaagaaacaatagatttcttacttaacagagaagaagcacataatgctctatttagagatgctttaaataaagttaaagatacaggttcaaatagagattttggagttacagaagattctagattatatttcgatttgtctactccagggccaaatcacaatactaagatagatattaatcctccttcttttgaaaaacctttaaaaaaataatttgatattttttatgttgttttgttttagtagttataaaaattatttactagaagaattaattatatgaaaaattaaatatgtatagttaaaaatgggtatacacttattataagtgtatatctatttgtttattgcaaaacatataataaaataacaaatgaggtggtattttggacagtaatagaaaacctaataatctaataaatgaaaaatctccatatcttttacagcatgcttataatcctataaactggtatagttggaatgatgaggcttttaaaaaagcaaaagaagaggataaaccaatatttttaagtgtaggatattcaacatgtcattggtgtcatgttatggaaaaagaatcttttgaagatgaagaagttgctgaaataatgaatagaaactttgtggcaataaaagtagataaagaggaaagacctgatgtagatagcgtgtatatgacagtttgccaagctatgacaggtagtggtggatggccaatgaccataataatgacaccagataaaaaacctttttttgcgggaacatatttcccaaaatattcaaggtataatagacctggagttatagatttattaaagaatgtatctgaaaaatggaatacaagtagggatatattaataaaatctggagatgaaataatagaagctcttaaggatgattttggtgtaaaaaatactgagggtgatttatcaaaagagatgttgagttcatcagttagagtatttaaggccatttatgatgaaaagtatggtggttttggtaatgctcctaaatttccaagtcctcagaatcttatgtttttaatgaaatattatagcatagaaaaagataaagatgtgttaaaaatggtggaaaaaactttagatggaatgtatagaggaggcttgtttgatcatattggatttgggttttcaagatactctactgataaaaagtggttggctcctcattttgaaaaaatgctatatgataatgctatgcttactatagcttttttagatgcatataaaataacaaagaaagagttatataaagaaattgctataaaaactatagattatgtagttagagagatgaaggataaagaaggtgggttttattcagcacaggatgctgatagtgaaggtgaagaaggtaaattttatacatttaatcctcttgagataattgaagttttgggtgaagaagatggaactttctttaataattattttgatataactagtagtggaaattttgaaggtaaaagtattcctaatcttataaaaaataaagaatatgaaagacataatgaaaagatagctgaccttagtaaaaaggtatttgaatatagaaaagaaagaacatctttgcataaagatgacaagatacttacatcatggaatgcattgatgatagttgctttaacaaaggcatatagtactttaaaaaatgacatatatttagagtattcaaataagtgtcttaactttataaataataatcttgtaaatgagtcaggtagattattagctagatatagagatggaagttccgactatttagcatatttagatgattatgcttttttaatctgggcgtatatagagctttatgagtcaacatttaatatgaaatatttagaaaaggctttaaatttgaatgaaagctgtatcaaccttttttgggattatgaaaaaagtggattttatatatatggtaaagatagtgaaaatttaatagcaagaccaaaagatttgtatgatggagctattccatcaggaaattctgttcaattatacaatcttataagacttgcgaaaattactggagataatagacttgaagaaatgtcatataaacaattaaaactgtatgtggataatgtaaagagttctccaactggctacagcttttatatgctttcattgatgtttgaactttattctactaaggaaattatatgtatttttaaggaagattctgatttaattgcatttaaagaattgataagtgaaaattttataccaaatgcaacttttttagcaaagaaatacaatgaagaaaacactattataggttttttaaataactatagattgaaggatgataagactagttattacgtgtgtcaaagtaatagttgtagtcaaccaattaatgatttacaaaaattaaaagatatgattttaggagtagaataatcataatagcgaaaaaggagatgctttaaaataaaagtctaatcatctcctttttttgtacaaaaaacagaaaaagagttcctaagaacacctaatctatgtaatgattgttttgttaaaaaataaaaatgacattatagttatataaaatattgtactataaaaaagtggtattatagatgcgatagtattaatcgtttttatttaccctatttcttctttttgcaaattcttcaagtgcttcagatttaattttatctatttcttcatattccataaaattagcatcttcttcaaagccatcttgttcttcaccattaaaacgatacattttttttagtaaactccataaggtctctaattcatctttggtaaattcgtgaaatacatctgccataaagtttattccagtcctactacatgttaccataaccttttttcctaagtctgtaactttaacattaattgctctcttatcatgaggacttggaattacatcaacatatccatttttttcaagattagcaactagtctatttatattttgtttacttgtacccatttttcttgcaatattatttaatgttgtttcttcctctggtaaatgaagaattgataaaatagtcatatactgtcttgaagtaagtataccaaaatatttatctccttctatttgtattttgtttgtaagggtaaaaagagttgcatatgtttgattcattaaaaagagctcttttagttcatttgaataatccatgaaatatatctcctttatttttagaagttgttttgtcgaaaacagaatatcatgaattaattctaatgtcaatatggtgtcaaaatatattaaagtattacttttttatgtaactattaattaaattattgtataattgtatgtaaaaacttctatgtaccaatgataatttctatgaggaattaataattcttaaattttttagaaagattttgacttgaaaatacttgtaatataatatataaattaatatactgaataaaatcaatctggagggataattatgaagtgtacaaactttactttcaaaggagaggaaggtttagatatatatacatataaatgggaagatgaaaatataaaaaaaccaaaggcagttatccaaattgcacatggaatggctgaaactgcacaaaggtatgagacttttgccaaggtacttactaaaaatggttatatagtatatatcaatgaccatagaggtcatggaaaaactgcaaagataatagaaaatgttggacatttagctgaaaaagaaggatttagatgtcttgtagaggacatgtatactttaacaaatattataaagaaagaaaatgaagatttgccaatttatctatttggacacagcatgggttcatttgcaagtcaaagatatataatggattacagtaataatttatctggtcttatactatgtggttcaaatggaaagcaaggaatcattctaaatcttgctcatctgataatcaatcgtgagattaaaaagtatggaagacgttctaaaagtaataaaataaataatttgattaaaaaatagctatgcacacttgtgactttagtcatgagttagtagctaaaatagtcagcatatagggaaacctatatgtagagataggatagaacctatccaatactacttgaattgctggaaacctctaaagctaaccaaactaaaacataaggatgaaataaacctaagtgtgaaagttacgaaagtagaaaaaattggttagatggtataaggttaaaccctaagtactttaaaatgggcaatcagcaggtaagctccgaataggagaaacttcaacgactattcctcttgagggaagtacactacaagttattggtagtggaagtgggtagaccttagcggataatgccgaaggataagatatagtctgtgcttacatgaaagtgtaagaagttcataagagaactgcataggtagtagcgaacttatgtgaacgacaacctcaaaaatgataaaagttaagaacttacggttcttatatatgttatttaaaaataaatataaaaaaccttcaaaatacttgttttaagtaattgcatattttaatattatgataggtgatgaaaaatggaagttactcatggtagaggatatgcatataatatgtcaaatatagacatccagtattatggggagacatctttggaatcatagttatttcgttgctactgtatcagaaaatacagaggagcagataagaaaatatattaataatcagaaaaaacaagtaaagtgaggtggcagtagtggaaaaagcttataagtttagaatgtatccaaataaaaaacaacaagagttaattaacaaaacttttggatgttgtagatttgtatataataagtatcttgctaaaagaatagaagtttataaaaacgataaagaaacttttacttataaacagtgtagttctgatttgaccaatttaaaaaaagaattaaagtggcttaaagaacctgacaaattttcactacaaaacgccttaaaagatttagaaaacgcatatgaaaaattctttaaaaaaaggcacgatttcctaaatttaaatcaaagaaaactaatagattttcatataaaactaactttacaaatggaaacattatgtattgtggtcaacatataaaactacctaaacttggtatggttaagataagggataaacaagtacctcaagggagaatacttaatgctactatatctaaagaaccaagtggtagatattatgtatcattatgctgtactgatgtagatattgaagcatttgaaaatactaataatcatataggtttagatttaggaattaaagaattttgtatctcaagttgtggagaatttatagaaaatcctaagtatcttaagaagtcattgaacaaacttgctaaattacaaagagaattatcgagaaaaacaatcggtagtttaaatagaaataaagcaagattaaaagttgcaagacttcaagaacatatagctaatcaaagaaatgattttctacaaaaactatctactaaattaataaaagagaacgatattatttgcatagaagatttacaagtaaagaatatgattagaaatcgtaaactatctcgcttaatttctgatgtgtcatggtcagagtttattcgtcaattagaatacaaggctaattggcatggtagacaaattgtaaaggtaggtaaattctttgcaagttcacaaatatgcaataaatgtgggtataaaaacgaggaagtgaaggacttaaatataagagaatggatttgtcctagttgtaatgaaattcacgatagagatataaatgcaagtataaatatattaaaagagggattaagactaataacaattcaaaataaataacttatgtaagaaccgtaggaactacggggatagcctgtggagaattagtaagacatattttagtatgcaaaattctgtgaagcaggaaccctgtgactttagtcatgggaggttcagatttggtggcaaaataataagaagaaatgaaaagactaagtttgactggttaagtagagataaagaacaagttgaaaaatatataaatgacccattttgtggagtagtgtgtagttgtggctttttttatgatttagttcaagggttaaaagaaattgaggataaagaaaacttaaaaaaagtgccacttgatatacctatttacataatatctggagataaagaccccataggaaaaaatggtaaaggagtcttaagactaagggatagatatataaaattaggagtaaaagatgtaacttgcaaactttacaaagatggaaggcatgaattgttgaatgaaataaatagagaagaagtttttgaggatataatttgttggttaaacaataaaatagaaatattgtaataaaaaaatataatgatatatttgctttaaatttatttatatataatatttgaaaagtggattatgtatatgcaaagtagaaaagagagagcctagaagtgattttttgctataatgccatttattgaataggtgggtgttattataaataaattattaacactcagtattattatcattgtatatggaatttattttatttaaaattccttgaaagtttaaatatagtaagttgtagtaaagagaaaatctaaatatttaaatgctatttaatgtgaatctattaattaggttatacttaaacttaattaatagattttatatttcaagccaatgagatagggttttagattaaaatataaccaatggttaaattacagacattttgttaactttccctcgatttactagtaaatattttttttatatacttaaattacaacagatgtactagggaggtatatatgcaaattaaaataggtaaagtcatacagcgtcttagaaaagaacgaaatttaactcaagaacaattagcaaagtttataggtgtgtcaacaccagcagtatctaagtgggagagtggaaattcttacccagatatagaattattgcctttattagcagacttttttaatgtgtctattgataagcttttaaattacaagattgatttaagtgaagaaaaagtaatgaaaatttataaagaattagaatcaggctttgctagaattgaaattgatttatcaacagaagaaccaaaagaagaatttagacaagacttagaatctgtaaaaaagctttctaatatgtatatagagaagtatcctaaaagctatttattgaagctaaggatatgttcgctgtatcagatgtattcatataaatttggtaagagtgaacttaatgacagagtaaaagaaacaacgaatattcttgaagatatagtgagaaatacagatgatatccaaataaaagaaacagctcttattatattatcaaacgcatattgtatgttggaagattatgaaaaggcagagttgtatttaaatatgatacataagtcaataggggatacaagtgttaatttagctatgatatatttaaagcaaaatagacttgaagaagcagaaatattgcttcaaaataaattgtttagtaatatatttaatataagcatggattgtaagggaataattaatgtatacaaaaatcaatacaaggaattaaagaaaaaattggagaatagaaattttaataaaaatgcaattgagagagaaatggagtatataaaaaataagttgctgtggtatgcaaatctttctttagaaataaaaaaaatgctcagtgaagataaaggtgcattttttagtatgtatgtggattatatggaattatctctaatttttttattttttaacatgaaagaagaagcaaaaaaagccttatatagtctaaaagaaatattagaaaaatatcctatacatgaaagtttggatgtaagtcaaatgagattttttgataaggtagagtctaaaaatttatatacttttaatatatatacaaacttgttaattgtacttaatgatgacagttataatgagcttagagaagaaccaatttttaaggatgtaattgaaaagattttagatatggaaaaaatgttgaaaaataaagaataagtaaaaatttaatataggacttaaagattaatcaaattaaaagaaagtgtttcaaaataaaaatttgaatcaccttttttgttggtcttaaaccgttatttagaaaaatagaggtttcaaaatagaaatctgaattatctgtattattacacaaaaatagaaacctaaatttataaaaatagaataaagtttgttatataaaatgtaattttgtctataaaatctcacatgttttcttaactttaagcgtgaaaaagaggatgtatcatgaattttttagttcatgatgcatccttatttgtatgaaatccaatatatctttattatttaaacaatggaaaagagtcttatttctattttgagacatctcttttatttaattatgaagttttatacagttcaataaataggaattatatttagaaactcatgacattatttcttagatagtgattaaatttatcatattccattttagataacttttctgggtaagacattacaatcaggttatgcccattgaatttttcatggtatggtggatgaatgtgttcataattatttgtcttatattttactctttcatagaacgccttgcgataaattgaaatctcatcaattggaaggtcaatttctaaaataatagtttttcctttcttatttaaaagctctaacgctctttgtccatatctattattgcgcatttctggaaaaatgcagaaatgttctacatagataaagttatctgtttcccaacataaaattatgccgacaaactggtttttatcataaattaaattgaattgatattctttatttttcaaaatttctgtttgcaaataagattttctttgttcatgaaatgggaaactaattttatataattccatagccttgtaatataatttattttcactggttcttaaccgttcaaatttcactttactcctcctaatcacgaaaattccaatttatttatgagttcattttaccatagtcagtatttgcatacaatgtgttttaagttgagtgtcatttctttcttttatttatgcttatatctcatagactaagagataattgcttaagacataactaaaaactattatattaagctttgataatctaaaaacagtatatttatggacttttctaggtctaaaagtaatcttaataattttagaagttacaaaaaagttacataaatttggaaagctataatatacatatataatataaggttaaaactgtaatgaataatattaatttaaaatttgaacatggaaggagattattatggagaaaagagaaaagaggataataatatcatctttattaagtgtatcaattttaatgggtttggtaagtatatattctatattaaataaagaagacataattttaactgttaagggtcaagagcaaaaagtatcttcctttaagaaaacagttgaggaacttttggatgaacagggtgtaaagtataattctgaagataagattaatccaagtttagatacagaactaaaagatgatatgaaaataaaagttgttaaggtaactaaaagtaaaaaagaagagattgaaaaaattccatttgatacaaagcatgtaaatgatagtaatttgttaaaaggaaaatctaaagtttatcaagaaggtcaagaaggagaaaaaaaactagtctataatttaacttaccatgatggaaaattagtcaaaaaagtcttatcaaaagaagtaatatctaaggagccaactacaaaaattataaaatatggaactaaagaaaaagtactaatagcatcaagaggagcaaatataagaggaggcaaacatatgaaagtggttgccactgcatatgcaggagatacaataacatctactggtacaactccaagatggggtgttattgcagttgacccacgtgtaataccatatggaacaaaagtatatatacctaaactgggtatgacttttgtagcagaagattgtggaggtgcaattaaaggtaatagaatagacatttttatgaacagtgaaggaaaagcttcaaattggggaaggaaaagtatagatatatatctacattaaattagtgaatagaataactttacttgaaggacaaaaaagtataaaatatgaattaactaaactgttagattattcttaaaacataaaaatatatctaaggggggataagatgaaaatagtctgcttaggagacagtttaacgtatggatttggagtatcacgaagtaattcatggacaaacattgtaaatgaagagactcgattagaaatagtaaataagggtataaatggtgatacaacaagtggtatgttagctaggtttaatgaagatgttgtaaaaaactctcctgatatagtttttataatgggtggcactaatgattttattgctggtgcgggaaatgaaattattaattctaatataatggctatggtgcatcagtcatattcaaaaaatattatacctataataggtataccattaaaaccagatattccaaatgttagggaagattggagttgttttactgattttaatatagtatctcaaaacttagaatcatatagttattggataaaaaaattttgtatgacatttaatactaatttcgcagatttttattcagaatataataaaaatatggaactagaaggatataaaaaattatattttgatgggttacatccaaccaaagagggtcatagaataatggcagacatttttattaattcaattaataagtatatagaagagttatagattacattaaaatgcttgtttatgcgtcagttgcaataaatacatacagtagagaggggtttattatggattatactaaaacttatgaagagtggataaagggttcatattttgatgaagatacaaagctagagttggagaatataaaaaataatgaaaaagaaatagaggatagattctataaggatttagaatttgggactgcgggtcttagaggaataattgaagcaggaacgaatagaataaataagtacacagttagaagagctacttttggattggcaaactatatattagaaaacacaacaaaagaagaaacaagtagaggagtagtaatagctcatgataatagacacaagtctagacaattctgtatagaatctgcaaatactttggcagcatgtggtataaaagcatatatatttgatagtttgagaactactccagaattatcttttgctgttagaagcttaaatgcaatcgctggtatagtcataacagcaagccataatcctccagaatataatggatataaggtatactgggaagatggagcacaagttatgccagagattgcaaatgcaataacagagaaagtaaatagtatacatgattatagtacaataccaaccttaacggaagctaataaaaatttggtagttttgttggacgaatcacaagatactaaatttatagaagcagtaaaaagccaaattataagaaaagatttagttaaaaatgtaggtaaaagctttaagatagtttatacacctctttgtggaacagggaatgttccaataagaagagcattgaaagaagttggttttgaaaatataattgtagttccagaagaagaaaatccagacccaaattttgcagggcttgattatccaaatccagaagagaaaaaagctttaaatagaggtatattactcgcaaaagaaaaaggagcagaccttgtaatagcaactgacccagattgtgatagagtaggtgtagcagtaaaaactactacaggtgagtatgctttacttacaggaaatcaaattggtggtatgctgacacattatataatagaaggattaaaagaaaataacaaattaaaagaaaatcctacaataataaaaaccatagttacatcagaatttggagcagatatagctaaagcaaataatgttgatgtattaaatgttcttacaggttttaaatttattggtgaaaaaataaaattatttgaacaaaataaaaatagaagttatgtatttggatatgaagaaagttatggttacttagttgggactcatgctagagataaagatggtgtagtttcttcattgttaatatctgaaatggcagcattttactattcaaaaggtataagtttatatgatggtttaatagaactttataaaaagtatggatttttcaaagaacagactatatctttgactttaaaaggtatagaaggtgtagaaaagataaaagaaataatatcttattttagagaaaatcaaattgattatataaatagtattaaagtagttgataaaaaagattataaaaatggtatagataatcttcctaaatctaatgttttaaaatactttttggaagatgaatcttgggtagctataagaccatctggaacagaaccaaaacttaaattttacatagctgtaaaaggagctagtgatattgaagcagataaaaagattcaaggtttgaaaaagtatatagatgacatggtcgaaaaattaaaataaaatattattattttataagataattttgtaataatatttatttagctgaaaattataatttactttcattgagtagaatatggaaatgttagtagaattgttattttcagcttttatttgtgttatttttacttaaataattatattatagaatgaatctgagtataattaatattgtataatgaaattaatttgatagaaaaggggatatttatgtttggtatagataagaaattgattgaatatataattgcaaaatccaattacagtgaattaagttcaaagtcagcagaagtatctttcttcttaatgttgtccatatttccttttttaatatttacaataagttctatagcttatataccgattcttcatttaaataagtatatagctttgtttagaaatatgatgccagaaggtgcttttgctgtgttatcttcaatcatagtttctgcaatagacaatagaaacctgaaatttttagcagtcagttttgtacttactatgtggacattttcaagagcagtaaaagctcttattaaaggaatgaatagagcctataaagttaaagaaactaggtctttttttaaaattttatctatatcatttttatttacaataatgcttttggtccttatttttttatctatgatatttttagtttacggggaaaaaataggttattttatttttaatcttgtaggattggatgagatatttataaaaatatgggatattctaagatacactgtaggtataataacaataatagtgatatttacacttttatataaatacactccaaataaaaagttaactattaaagaatctgcgccaggtgctatttttgctacttttgcttggtttttagtatcatttttatattcttattatacaaattactatgctaactatgaagtaatctatggaagtatagctgaaataattgtacttatgacctggatgtattttagtagttggtctatcgttattggctatgaggtaaattcaagattgtattttagaaagataagacatgaaatgttaaagtaaagtatttaaaataaaagagagtatttagtattataaatgtaattgaattaataaagaaatattgacatttaagttaaaaagtctagaatttttctgggctttttttatttttagtataacttgacaaattttatttaatgggatagttttaatttataatcatctttgaaaagatgactattgataagtaaggtataaaattggtaagtatcaaaaaatatactaaataaaaattatagtcctaatgagttaatttctgtattttcaaataatgcagtatttagtcatgtgtttttatatgcgcctgtatttccaattaccaatatattagaataagctactgtaattagatttagaaaaaagcgacataaataattataaacaaataataaattacataaaattaaatttattcacaagtatatcttataaaatatgttataattaatagaaaattgtcatataattaattaagtagtattattataaataacattgaaaggtagtggttagaatatggatatccataataaatatgtaaattttataaaaaatatacctgtaccttttttatattgtagaattgtaaagagacaagaagatatagaatatcgagtagaatatataagtaagggtatgggcaaagtattacaattagaagaaggtatttgtgataaaaatatactagatgtattgcctgtatttaagtctaaaaaatatttcaaagagttgttctcaaatgaagtggattgtataaaaaggtacattccgacacttaaaaactggataaatataaaaaaacagataataggggattcatacataattttgtattttggtaaaattgtatttgattatagacagataatcgattcctttgataaaaaggaaaaagtagcttatattaaagacgaagaaggcatatatatagattgcagtgaaaatttaataccaatattaaataacaacattaaaacaacgaaagatatctttggtaaaaatgatatagaagtatggggagagaatacaggaaaattatttagagatgattatagaggaggagtatctagtaaaaaaagatttttacaaaatctttttgaatatgaagaaacattttttatggttgaaaaatattttttgtatgatgaagacgaacttttaggtactatagggataatagataatataatatatagtggttacagtaatagaaattataactcaaaagatttaatgaagatgatagaacactcaattccagagaatatgttttataaagatgtgtatggaaattatattggatttaattcaggttttttgaatttagcttgtatgaataaagaagaattattagggaagaatagttataaaatatcagaagaagaagctttaataaataagatatttgaaagtgataagggtgtagttgaaaataaaaaagtagttacatttgagttaaatgtaagtataaatgatgaaaataagtgtattgagattacaaaaaggccgttttttgatagctatggaagtgttattggaataattggaacagcaagggatataagtagaagaaaaagattagaagaggaaatggataaaactaggatggaattttttgcaaatttatcccatgaacttagaacgcctataaatttaatatcatcttcattacaagtgatagaaaaaaaagaagcagatttaatagaatcaaatgatactttaaaaagaaatttaggtataataaaacaaaatggaaatagaatactgaggttagtaaataatgttatagactttacaaaaatgcaatcaggatatttagattttaaaccagaagaatctgatataattgcatttatagaggagatatgtatgtctgtagctgattttgcaagccaaaataatatacaacttacatttgatacagaaatagaagaattttcaatgttatttgattcagaaaaattggaaagaataatattaaatttactttctaatggaattaagtacaataagaaagatggaaaaataaatatatttttatatgtgaaagataatgtatttaatatgaaaatatctgatagtggaataggtataccaaaagaaaaaatagataaaatatttaatagatttgaacagattgacaatgaactttcctacagagttaaaggaagtggtattggactttcattagtgaaatctttggttgaattgcatgagggaagtatatctttaaaaagtcaacttggtattggaagtgaatttatagtttcattacctgttagaagtgaaaataatattgaaaaatataatcataaaagagaaatcagcaatgaactaagtaaaaaattagaaatagagttttcggatttataagtttaaatataaaaaataaaattttaaaaaagtattgacaattgatttagaagggtttaaaataaattacaacataataaataaaaaggcgatgaataggaagagtaaatctaattcgattaccagagagaagagtccattggctggaagactttttaaattagagggattgaaaactacctaggagctactttctgaagtcatctgcattagtagattttagtaagaatagtcgttagctgcgttaaagtgtaaagtgagttttcatgatatatgaaaactaaattaggtggaaccgcgggaataatactctcgtccttatgttataaggatgagagttttttgttgtttaaaaatataaacagtaatcataataattatagaaaatataaaagcgatgaataggaagagtaaatttaattcgactatcagagaggaaagttcacaggctgaaagactttctaagtttgagaaattgaaaactacctaggagctgtggtctgaagttactttaaaaagttttagtaagactaaccgttaactgcgttaaagtgtaaagtggattttatcaataaatgataaaatcaaattgggtggaaccgcgagtatagactcgtccctttatatagggatgagtctatttttattgcaataaaagattgaaaataaaaaaaaatcggaaaattataaatttaggaggaaaataaaatggaaaataaagtgaaaattggagtactaggatatggagttgtaggaagtggacttatagatataatagataataataaagaaaaaagaagtatagaaatagttggaattttagttaataatttggaaaaacataaggataaaaaatattctaatataataactaataatatagatgatatatttaataaagatatagatatacttgttgaagtcatgggtggtttagaaccatcattatcttatataaaaaaagcattaaacaataaaattcatgttgttacagcaaataaagatttgttagctgaatgtggagatgagcttgcaaaattagcaagtgaaaataaagtaagtattaaatttgaagcttcagtcgcaggaggtattccagtattaaaaccaataatagaatcactagaaggaaataatatagatagtataaatgcaattttaaatggaactactaattttatattatctaaaatgtatgatgagaatctatcttatgatatggcattaagacaagctcaagaattaggttttgctgaagcaaatccagagtcagatgtattagggtatgatgctgctagaaaactatcaatattatcaactctagcttatgacaatagagtatattggaaggatgtgtatttagaaggaattacagatatagatgaaaaagatattgaatatgcaaaaaaattaaattgtaaaataaaattgattggtcaaagtaagtatgaaaatgataaagtaagtgcttttgttagacctgttttagtagaaaaagataatatccttgctagaatagacaatgagttcaatgctgtcatagtgaatggagattcagtaggagaagtttcttttgtaggtaaaggagctggaagtttagcaacaggaagtgcggtttattcagatgttatagatataatagataatagagtttcaagtatagattcttttactaaagataaaatacaagttaataaaatagttagagaaaagtgtggagcacttcttagatttaaaaaatgtaataaagatgaaattctaaatatagttgagaattgtttagtaaaattcgatattttaaatgatgatgatgaacttgctattatggtttatgctgattctgaatatgaaataaacaacagtttatgtctaataaaagataaaggatattgcgaaaaaatgaataaaatgttgaaaataagttaaaaaagaaaaaataagtttatatgtaacatattttgacgattttaatactatatagtatgagatgaaacaaaacatctcataaaaaattaaaattcaagggagagatatgttatatggaaaataaaaaatatgcaaatggtggttattcagaagactggtatgaaagaggagaatctacagctaaatggttccagaatgatagagaagaatatgaaagagcagcatacgatgaagatagagaaagaagaggctcaaactgtggatgttcagattcaggaggaaatagacctagaaactgtgaaagatttagaagagaagctgagataagagaaagagaagcaagagaagcattctgtgaatcttcagagagaaagaaagaagcactagcatatgaatgtgaagctagaaaattatgggaagaagcagaaaaatactgggatgaatattcaaaatacaactataaaggaatcgaatatttagcagaagctgctagattatttgatgaaggtatggaatgtgaagctagaagaaatggaaataatggaggaaacaataataattgttgccataaatgccataaatgtaattgtaactgctgtagaaaataaaaaaattcattgacaaatcaatagttaaaatatatcatattatgtataataaagagaaaattcagaaaaaaataatgattagaataaatttaagtatatttattagacaaatagtgctcagttagtgaggtgagtacaatatgattaaactcccatcctctagcttttgatagagggtgggagtttttatttattgatatatcttaaatgaggataatattgtaaaataaatgagtatgagattgtaaaattaggaggtaaaaaatgaaaagtattaaaacatcaagtatgaaagaaaaggtagatgaaaagatattaagagagcaagtaagttctataatagaagatataagaaataataaggatgttgcacttaaaaaatataatgagaagtttgatagaaatacaagagatgaatttagaattactaaggaagaaataaaggaagcttataagcatgtagatgacgaatttataaataacttaaagattgctgccaaaaatataagagaatttgctaaagctcaaaaactaagttttgaaaacccttttgaaaaagaaatttatccaggtgtaatcttaggtcaaactaatattccaatagagtcatgtcttgcatatgttccaggaggtcagtatccattgttttcaacagctcttatgcttataatacctgcaaaagtagcaggagtaaaaagaatagtggcatgttcaccaactatgaaaaatactgaaaagataaatcctaaaacattggtagctatggatatagcaggtgctgatgaaatatatgcaactggaggagttcaagctatagcagcatttacatatggaacagaaaagattaatccagttgacataattgtaggaccaggaaataagtttgtaactgaagctaaaagacaatgttatggacaagtaggaattgattttgtcgctgggccaagtgaagttcttataatagcggatgaaacttcaaatccagtttatattgcagctgatttattagcacaatgtgagcatgatttaaatgcaagaggaatattattgacaaatagcttggaagtagcacaaaaagttgaaaaaaatatagaaagtatgctaaaagatttgccaacaaaggacatagcatatagttcatgggaaaataatggagagataatattggttgatgatatggaagaagccattaaaataagtaatttttatgcaccagaacatttagaagttgcagtaaatgagtataatgatatttgtgatagattaactaactatggttctttatttattggaaatctttctgctgaggtgtttggtgactatgtttcaggtaccaatcatacattaccaacacttaaagcatcaagatatactggtggtgtttgggttggaacttttatcaaaacttgtacaaagcagatatttaatgaaaaagctatacaatcattagcacctgtagctgaaaagctggcaaaagaagagggattatatgcacatgcaaaggctgctgaggttaggtttaaaaagtagtaaaaaattttattttggcagtcgagatttagtattagactgagataaagaaaacgctgagaacctgaataaatactatattttgtgggcctcggcgtttcttttatatctgtatataataggataatactacctgtgtgtttaaatgctaacttaatatttcttttctaaataatgtttatgaaatagttaatatttttagttaatacttgaaaaaaacttttgctaactgtgcaaattcatctgcatttgtcaatatagcagggtgtcctccctgactaaaaatgtgaatacttgcttttgaaataaaagttgccatttgcttgtactcttcttcaagattatgacgacacatttcgtcttccttacttcctgtaaataaaattggcatttctaatttacacaattctttatgaaataaagggcgtttcttgtttgcacattgcaatagagcttttgtatcaagattaacaacattctcccaatcttttccatgacaccattcatagaattttcgtgcttgaatatcttgctttgatttttcccttccagtgattagattatctatgaagttatcattaagagtacgtccatcaaagctatctgctataattgcttcaactaaatcgggacgttctaatccagtattaacagctgcccatgctcctccacttgttccaattaagccaactttaccacaattcaaatgttcaatcagtgctattgtctgtaaggcttcatcatgccatatgtcaggagaaaattgagaaactctatcagactgtccattacctaaaaaatcaattaagatacatctaaaattttctacatataatggcacaagtgctttaaacatattagaagaaccagtattaccatgcaggaaaattatcggtttaccttgtccatattctttataaaaacaagaattaccttgatactgaaaatatgacatatattttcctcctttttatttgttaagttaattataacaatataggtatgaatgaaaaacctcatgttctttcttagaataaaaatgtgccacgcataaaacgtgacacatttctaattataaattttgctgtttaagtattctttgtatgcttttctctgtcaaaaagtatttctctgataactgcttgatactcattccattttggaaatttatacagatttgagaattacgagaagctaagacttgtttggtgtttgtgttttcaccccaatgctttttgtgctcttgctttttgggaatataaatcactttaccatctatatattcttgcacttgctcaatcagttctttaggcagtaagtcaatcgaattttgatagctcattttgcacctcctaaataattactctttaggattagcaaaggctactgctactcacaattaaaaataaaattttttattatgtacaatagcctttgctatgcacaagttccaattcccataaactaaatactcctttctggtttgaaaaattcatctgaacattgatttcgattttaagatagagttcaatgacaaatttacatttttattatatatattcagatagataattgcaactgtctttgtatgaggatattttattatagtcaatactataatatatatttatatcatcaaactaatatgaacagttgaaaggaatatgaacaataaaacttagtcaggaagaataattatgaagcagacaattgagaaatttgattttaaagttttattgaaaatttattgacaaatttaacttgtaaatattatactaaacttaataaataaagtttataaagtaaggtgttgtctatgaaaaatatagttggaaaaccgcaaacgataaaaaaagtaaatgaagatttaataaaaaacattataaaaaatgaaggtcctataacaaaaccagaaatttcaagcattactgaattgagtttagctacagttaataagattgtggagcaattagctttgaaaaatgaagttaaagtaagtggactaagtgaatctactggaggaagaagagctcaattatttgaaataaatgcaaacttagaacacataatagctttatattattatagaaattgttgtataggggtagttgccaatttattaggtgaaataatttatcaagaagaatttaatataagaatggatacatatgaaaacgttaaccaagatactttttttgttatagatactctaataaaaaaggaaaaaggaaacaatataagggctattggaattggtgtcccaggagttgtaaaaaaaggtgtagttaaaaatataccaactataaaaagttgggaaggtataaatttagaaaatttaataaagagtaagtacaatactaaagtgtttatagaaaatgatacaaatattactactattgggatttatcaaaaacagtataaagacaaatataaaaatatggctcttatgtatttagaagatggtattggttcaggtatagttataaatggtgaattgtatttaggttctacaaattttgctggagaattaagttatctaaatatagaatttggtaagtataactctaacaacttaaatcttgaagattatattatgagtttaagaaaaagatatttagaaagtaaagataataaatttaagaaagaaattttatctataatatcaaactttataaggactcttgtatgtgtcctaaatccacaagctatgattatacagtgtagtatattaaccaagagtgacatggagtttatagaaaaagatgtaagtaataatgttggagaagaaaattttcctaaattaataaaagtagagtcattgagagaaagaagtataaatggagtaattagtatgtgtttaaaagaaactgactatcaatattccttatctaataaaaaaggaggatattaatgtgaaatatttggtttcaatagatggagggggaacaaaaactaaattttgtgtaagtgacttagatggaaacatacttaaagaacataccactggttcaactaattataagtcagttggaattaaaaaaacatatgaaaatattaataatggacttaaaaaaatattaaaagatttatatatcgattatgacgatattgagtacactgtatttggtatatctggttgtgattctcctaatgattataagattataatggatgaaatattaaaaattgggattaacaaagaaaaaatatatctggcaaatgatgcagttttagctttttatgcacaagctgattcccctggtttagtaattgtggctgggacaggttcaattatactgggaattaaagaagatggagaaatatatagagttggtggatgggggtataattttagtgatttgggttctggatatgatatagggagaaaattattaaagaaagtattgctttattgtgatgaatgtcatgagtatagtgatttatttagttgtgtcttggatttctttggagcaaatagttttgaacaacttgcatatatgattactgatataaacaataatgttgaaatagcaaacctagcttcattagtgattgattgtgccgaacaaggtgataaattagctattgaaatattaagagaatcatcaactgaactatctaaattagctcaagtaatattgagaaaaatatctaatccaatgaaaatagataaaagcgaaataaatatagttttgtctggtggtacattaaataaaactgtatatgctcaaatgttaatgaataatttaaaaacagaaaatacagataaaaatttaaaatttatatctcaagaaaatcagccagtatatggggggataagacttgctatggcattagctaataggagagttaagcatggatagaaaaaaggtaatagtacaaatttttactggaggttttaaggctaaagaaataaagtttaatgatataaaatgtaaactactagaattattggactgtattgatatagaaaaggttatcatgggatggagtgtagatgaagaattatatgtagaaactaaaaaactattaaataaatataatgttgaactatatctttggttgccatgtttttctgaaataggattacttgaaaaaagtaatttactaattgattatatggggaaggaagtcaagggctatgctttacaagaggatgaaaattttgaattttattgcccaaataataaggaaaatataaaaaatataaagaaaatatatagtacttattttagtgatattaaatttgatggaatttttttagataaaataaggtatggttctttttcgaataaactaaatggtgtttttaattgtttttgtaaagattgtttaaatatatatgaaaaaaataatattgataaaaagtcgttaatgagagaaatgaataatgtgtctaagggagttatagataatgaagatactccatctggtataacagaatacattaatggaaaatacaaatttaaaaataaaatatgggaagatttttttgaaacaaaaaatcaaaatatatacaagtcattattagagataagtagttattttaaaagtaagggattgaaaataggtatagatactttttctccttttatttcttactttacaggtcaagatttaaaaaaattacaagaagtagcagattttataaaaccaatgatgtatagaactacaaaagctccagctggtttaccatttgaatttgaaaggtttattgatgaatccatacataagaataaagagattggaaaaagaaatttcttagatattttaggaattaaagagtatgaaggagatgtatatcctatagaatttgtactagaggaaatcgattttatgacaaggaatcttaataaagatatatatgtaggagttgaaataaataaaaaggaaattatagctcctgttacacctaagtacataagtgaaaatatttcaaatataaataagacaacagtaaaaggatatgttttatcttgggatttgttatcagcaccaaaagaaaatattgatgaaattataaaatggtttcggaattagtgaggtgatatagtgagtaagatattagaaatgcaacaaatatataaaagttttggaaaggtagatgttttaaaagggataaattttgagttagaaaagggagaagtaagagctcttttgggagctaatggagcaggaaaatctacacttattaaaattttaggaggagttcattctcaaactaaaggtaaagtaattttgactggtaatgaaataatgtttaaaaattcacatcattctaaagaaaatggtattagtataatttatcaagaattaagcttgataccaacgcttacagtacttgaaaatatttttcttggtagagaaattttaaaaggaagtgtgtttttaaacaagaaagacatgcttgaggaatatatgaaaatttgtgaggattttgattttaatatagacccacatacagtagtttctaatttaagtgtagcaaaccaacaaatggttgagataatgaaagctgtttcatgtaattctgaaattatcataatggatgaacctacaacatcacttactaataatgaaaaagatgggctatttaaaataataagtagactaaagtctaaaggtaaaacaatagtctatatttctcacatattagaggaagtttttaaagtatgtgatagtgcaagtataatgaaaaatggaattatgattggaacttatgatgtagaggatttaactaaattaaagataactcaacttatgacaggaaatgataatcacaaacttattgagaagaaggattatacatttgcaaagtatgaagagccaccagtactagaagtaaagaatataagctggtctaacaaaataaaaaatgtttcatttaaagtttatagaggcgaagttgtaggtcttgctggtcttgtaggttcaagaagaactgaaattataaatttgatatttggtatagataataaagatagtggagacatttttatcaatggtaaaaaagtagacataacttctcctaaggttgctataaaaaacaaaataggattgattcctgaagatagaaaaaatctaggattaattttagaacaagctatatacacaaactcatcatcagtacaaattgataaattcaagaaatttttgtttatagatagaaataaagaaattgagttttctaaaaaaggtgttaaggaattaggaataaaagttagtgatgtaaagcaagaagtaaaagagcttagtggtggaaatcaacaaaaagtagtagtttctaagtggttagagaaagatttagatttaataatatatgatgagccgacaaagggaatagatattgctgcaaaagaagatattttcaatacaatcaaagaattttcaagtgaaggaataggagtaatatttatatcttctgatttagaagaagtaataagagtaagtgatagaattttagtaactagagaaggttctattgtagatgatttaaaaaatgagaatatacaggttcaagatataatgaacagtatatttaatgtataaaaaatgaaaatggaggactgagatgaagaaagcttttgagaagttaaatttaagagattatggagtattattaggttttttagctttatgtatagctataagtattgcaactccatcatttttaggtaaacaaaatatacttaatcttttacgacaatcttctataattggaataatttcagcaggtatgacttttgttataatatctggaaactttgatatatcagttggagcagtagcagctcttgcaggtgctataacaatgaaatttgcgactggtggaactaatttgtttgcatccatgctcttaggtgtagcgatttgtgcagtaataggattaatcaatggtatagtagttgcaaagataaatgtaccatcattaatagcaactatggctatggtcactattgtaagaggattgctgttgatgcttacaggaggatatccaattactgaaaatataccaatacttgattacattggaaatggatatttgtttaatataccaataccagtagtaattttctttatagtggtgttagtttcatttattgtacttaataaaactaagtttggtagatatgtttattctgtaggagggaatcaagaagcaagtaaacttaatggtataaatgtagattctcacaaagtgaaagtgtttattattaatgctgtacttgcaggaatagctggaatcgtactaacaggaagacttgggactgcaactgctattgcaggtgaaggatatgatatggatgcaattgcatctgtagtaataggaggtacatcagtggcaggaggttctggttctgtacttaaaactgttataggagtattacttatgagtgttataaacaacagttttaatcttcttggaatagatgtatatttccagtacatatttaaaggattaataattttagcagcagttggatttgattcttatagcaagaaaaaacttgcttcaagataaaaaataagggggatttttttatgaaaaaattaatgaaacatttagcattgttgttatcacttgttatgatatttggtttagttggttgttcaaatggtggtgacaaagaaaaaaatggagaaaagaaaatagcagtattactaccaggttcaacaggttactttgtagcaactaaacaaggtatagatgcaaaatctaaagaattaggtgtaagcgtggaatatgcagatgctcaatgggatgctagtaaacaattatcacaagctgaagattttatggctaaaggggtagacatgattgcattatgtggagttgattctgctgtaagtgagagaatagttaaagctgctaatgattcagacgtccctatagtagcatttacaaattctataggaagtaacccaactggagaatttaaaggtttagttacatatataggacaaaatgaggaggaaacaggagcactaactggaaaaattgctaaaaacttattaggagaaactggtgggaaagctgtattaatagaaggagtaccaggaactactccacaagtattaagaaaaaaaggtcttgaaaaagaattaaaagatagtaatatagaaatagtttataatcaaacttcaaattgggagaaagagcaagctttaaaagtaacagaagatttaattcaaaagaaaactgattttaatgttataatatgtcaagatgataattctgctacaggtgcaggtcaagctttaaaagatgctggtcttaaggataaagttaaagtcataggtttgggtggaagtaaagatggattaaaagctataactgatgggttaatagatggtacaacttatatgtctgctgtagaagaaggtggattagtcatagaaaaggcatctaaattccttaaaggtgaaaaaatagaacctgttacacaaattaaacaagttgaagttaacaaagataatatttcagagttcaagggtgaatggtaaattgtcatagataataaataagatttttagagttactttagaaactatataaagtaactctttttttaatttaatttagtgataaattattgaatagtatttctaaacaaataaaaaattaatataaacaaagacttaattatactaaattataagtaaaactaatataaacttatggaaaaaaggaaaacgtctaaagtattggaattactatagtgtaggtgtggtattaaaaaaacataaaaaaacataaaaaaattgttgaaaaaaatatagaaattttgtataattaaagatttgaaaagttcggtatacaaagccaattcttttgtatataatatatataaattcagaaaaaggaagggatatgtatggccaggcggttatttttagaaaggattggacttatatttttaggttcagcaatattagcatttggagtttataatttttattatttaaacaacataacagaaggtggagtgttaggtattttactactgttaaaaaatttattcaatatacaaccagcaatagcaaatgttgtaatagatggtttactacttttagtaggatataaatttttcggtaaaaaattccttatatattcaatagtagcttctataactttttcagtgttatatgacttatttgaagctataggacctctagtaccacaatcacaaaatatgcttttatcaactattttggcaggtgtaactgttggaactggtgtaggtatagtagtaaaagcaggttgtgcatcaggaggagacgatgctttagcattagtaatttctaagactacatctttgaacatagggcaagtttatttagcaacagatgttattgtattgttgttatcattattttatctatcagcgtttgatatcttttattctttgattgctgttacaattagtggcaaggtaattgattttatttattatcatggtaaaagtttggatatggatataagtaatgatatagttccagaatgttaatataaattaaataactttagattttattaggggtggcagatttgccaccttttttgtgtctaaatctttatagaaagtataatcccatctaggtttttgcaaatctcaaatatagaattatgttggaatgactgggaatacgattgctagatgtgcattttaaaaacccaattttatatttatgaaatactaatcattaatggatgtttcttaatcctatctttatacctaaaatgataagataaatgaagtagcaatacaaaactaaaatttgtaaaagagattaaattaaatggaggagctaaaatgttggatatagttatgatagcattgttattcataggatttgtttccatgaagttacttgctgattggtgtgggaaacaaactgagaaaaaataatgtaatgtatggagggattacctatgtggtttctggcagttgtaattataatgttaataatatatttggtatatgcgcttattaatcctgaaaaattttaaacagtataaggctaataagtaagttgaattggggggaacaatttttatggtgcagatagtaatagtgttagcgatttttatgattttagtaatacctatgggcaagtatttatatcatatagctactaatcaaaaaacatttggagatagactatttgataaagtggacaattttatatataaggtatgtagtatagataagaaaaaagaaatgaactggaaacagtatgcattagctttattatttacaaatgcagttatggtatttataggatatatcatacttagaactcaaagtatgcatatttttaatccaagtggaattaaaagtatggaacaaggactatcatttaatacaataataagttttatgacaaatacaaatcttcaacattattcaggtgaatcaggactttcatactttagtcagatgacagtgataatatatatgatgtttacatcagcagcaacaggatatgcggctgctatggcatttgtaagaggtctagtcggtaaaaagaaaacattgggaaatttttatgtagatttaattaggataacaacaagagtacttttaccaggagctttaattattgggcttatattagttacacaaggagtaccacaaacttttgctgggacagaaacagtgactactatagaaggaaagcttcaagatatagctagaggtcctgtggcagctcttgaatcaataaaacatttaggaacaaatggtggtggattctttggttcaaattcatcacacccatttgaaaatccaacaataatatcaaatatagtagaaatattatctatgatgatattaccaggagcttgtgttgttgcattcggtcacatgataaagaataaaaaacaaggttgggttgtgtttggcgcaatgtcaatcatatttttaataggtctagtagtgtgctttaaagcagaaagtgcaggaaaccctattttatcacaattagggcttaatcaaagtatgggaagtatggaaggtaaggaagttagatttggtatagcacaatcatcattattcacaacagtgactacttcctttacgacaggtacagttaataatatgcatgatacactgactcctttaggaggattagtaccacttttaaatatgatgctaaatgtagtatttggtggtaaaggcgtaggtctgatgaatatgttgatgtacgctataatagcagtattcttatgtggattaatggtaggaagaacaccagagtttttaactaagaaaatcgaaggaaaagaaatgaagcttattgctttacttattatattacatccacttttaatactaatgttctctggtctttcagtagcaataccagcagggcttgaaggaatttcaaatcctggattccatggattatcacaggtattgtatgagtttgcatcttcagcagccaataatggttcaggatttgaaggtctaggagataacactatgttttggaatataacaacaggtatagttatgttctttggaagatatgtgtctattatagtactactagcaatatcaagtttgttagcatctaaaaaagctgtaaatgaaagtataggaacacttagaacggataattttacatttacaatagttttagtacttgttgttttaattgttggtgctttaacatttttcccagccttagcgcttggacctatttcggagcatctagtgttgtggcactaaaaaattgggagggagtaaagttttatggaaactaaaaaaacaaagtttattacaaaagatattttcaaaacttccattatagaagcttttaaaaaattaaatcctaaatatatgatgaaaaatccagttatgtttgttgtagaaattggatttatagtaacattgatacttacaatagtacctagtttgtttggtgatgaaggcaataatttaagagcttataatgggattgtaacaataatcttatttataacagtcctttttgcaaattttgctgaagctgtagctgagggaagaggtaaagctcaagcagatacacttaagaaaactagaaaagatacagtagcaagggttatagatacgttaggaaatgaaaaaatgataagtgcaagtgagctaaaacttggtgatattgttttagtaaatgttggagaagttatcccaaatgatggagaagttatagagggcatagcttctgtggatgagtcagcaataactggagaatctgcacctgtcatgagagaatcaggtggagatttcgcatctgttacaggtggtactacagttgtaagtgactggttaaagataagaataacaacaaaaccaggagaatcgttcttagataaaatgatagctcttgtagaaggtgcttcaagacaaaaaacgccaaatgagattgctttaaatactttgttagtagggttaacacttatatttatggttgttttaatatctctttatccaatggcaaactatgcaggtgtaaagattccaatttctactatgatagctcttttggtatgtttaataccaactactataggtggattgttgtcagctattggtattgcaggtatggatagagtaactagatttaatgtaattgcaatgtcaggaaaagcagtagaagcttgtggagacgttgatactatgattttggataagacaggtacgattacttatgggaatagacttgcatcagaatttatagcagttggaaatgcagattcaaaagatttaataaattattctgttatgtgttcattaaaagatgatacaccagaaggaaaatctatagttgatttaggtatgaaattaggttcaacaggtaagacaaaagaggcagaggaagctgagtttgtagaattttctgcacaaactagaatgagtggtattaacttagctgatggtagagctataagaaaaggtgcttatgatagcataataaaaagagtaaaagaatctggtggtacagtgccagaagatttagaagaaaatgtaaatcgagtagctaaactaggaggaacacctttagtagtgtgtgtagataatgagatatatggaattatctacttaaaagatacagtaaaatcagggcttgtagaaagatttgctagacttcgagagataggaataaagacaataatgtgtacaggggataatcccttgacagcagctacaattgcaagagaagctggagtagatggatttattgcagaatgtaaaccagaagataaaatagatgctataaaaaaagaacaattagagggtaaaatagttgcaatgacaggtgatggaacaaatgatgctcctgcacttgctcaggcagatgtaggtcttgcaatgaatagtggtacaacatctgcaaaagaagcagcaaatatggtggatttagattcagacccaactaagatattggaagttgttgaaataggaaaacagcttttaataactcgtggggctttgacaacatttagtatagcaaatgatgttgcaaaatattttgcgattataccggctatatttactcttgcaatacctcaaatggagatattaaatgtaatgaaactttctacatcatttagtgcgatattatcagctttaatatttaatgctataattatcccatgtttaatacctcttgcaatgaagggagtaaaatatagacctatgaaatcacaagctatgttaatgagaaatatgcttatatttggtcttggtggagttatagtaccatttttaggaataaaattaattgatttattgattacacctttagtaatgattcttaatttaggttaataaatggaggatataaaaatgaaaacattaaagccagcattacttgtaagtattgtattgttagttgtttgtggacttgtatatccacttgttttgacaggtgtaagccaagttgcatttaaagataaagccaatggaagtatgatagaagtaaatggtgtaaaagtaggttcagaacttattggtcaaagctttacagatgcgagattctttaagggaagagtatcatcagtaaactataatacttatacaaaagaagatttagtaccagataaagatggaaatgcatcttatggaggtgtatcatcagggtcttttaattatggagctacaaatccagaacttcatgatagagtacaaaaagatatagaaaagtttttaaaggataatccaactgtcaaaagagaggatataccaacagatttacttacagcatcaggttcaggacttgaccctaatataagtccagcctctgcaaaaattcagataccagctatagcaaaagcgtctggaatatcagaaagtaaattacaaaaaattgtagatgataatacttccaaaaaactttttggagttttaggtgaagatagagttaatgtactaaaggttaatatagaggtcgcaaaaatattaggtcttatatagtattttgtggaattttagtaacaaaatattactcaagatttaatttaaaggttaaattttaaagagtgaaaatcaataatgattttcacttttttatttgaatattactaatatttggaataaagtgattgtaagtataaaatccaaaaaaaggttgcattatcaaaatgataatactataatatatttatcgttatcaatttgataatagatttggacatataggaggaaatagtatgttatataataacgcattagagttgataggaaacacacctgtagtaaggctgaataatttaggctgtactaatgggtgttctaacatatatgtaaaattagaaaaagtaaatccagcaggaagtataaaagatagagctgtttatgaaatgttagagggcttagagcaaagaggagaattaaaaaagggagatgtactagttgaagcaactagtggaaatactggtattgcattatctatgataggaaaattaaaaggatatgaagtagtaatcgtaatgcccgaaacaatgagcgttgagagaagagatttaatgaaggcttatggagcaaatttggtgcttacagatggtaaagctggaatggcaggttccatagaaaaagcaaatgaacttttaaaagaaaatccaaactataaaagcttaaaacaatttgaaaataaagataatccaaatgcacattataaaacaacagcagttgaaattatgaatgatgtcaaagatttagatatattcgtatgtggagttggaacaggtggtactttaataggaactgcaagatatttaaaagaacaaaatccaaacataagagtaattgcacttgaaccaaaaaaatctccagctatatcagaaaacaagactggacctcataaaatacaaggaataggtgctaactttgttcctgaaaattatgattctagtgtagttgatgaagtaatattagtagatgatgaagatgcatttgatacagttaaattacttgcagcaaaagagggaattttagtagggatatcttctggagcaaatatatttggtgctatagagatggcaaaaaagtatccagataaaaagatagttacagtagctccagatggagttgataagtatatgtctatgggaatattttaataattttatttgagggagtgaatactttgtttaagaaaataaataaagatattgaatatataatgaagaatgatccagcagctaggtctaagatagaagtttttttactttatccatcagttcatgcaatgataatgcataggatggctcatgctctttataagaagaagaagctttttacagcaagattaatatcccagatatccagatttatgactggcatagaaattcatcctggtgctaaaatgggggaaggtatattgatagaccatggaatgggtgttgtaattggagagacagctgaagtaggtaatagggtgacaatatatcaaggagctactttaggagctacaggaaaagatactggaaagagacatccaactgttggtgatgatgtattaattggtgctggaacaaaaatactaggacctttaaatataggttcaaattcaaaaattggtgcaaattctgttgtcgttaaggatgtacctaatggtgcaacagttgttggtataccagcaaaaatagtaaaaataagaaacctagaacctgtaaaaaagaataaaaaagaagtgtcctatgagtatgatgaattagataatgtatattatatataggatttatataactataaaataaactttataaaaattattttaaaaggtatttttttcaaatttgaggacataataaaaaagaactgaatgttacagttttggttcatcaatctttgataaacaagattttaaatttgtagcgtctaggaggattttattatgaaagcaaatgttaatcaagatacttgtataggttgtggattatgtccatcaatatgtccagaagtatttgatatgaaggatgatgggaaatcacatgttatagttgatgaagtaccaagtgatgctgaagaatcagcagcagaagctagagaaagctgtccagttgatgcaatagatgtgcattaataaaataaatgcctataaaaattgaattttcaatttttataggcatttgtcttttattcagttagtatttcaacccctgtttctgtaactaaaaccatacattcccattgagcagataatttaccatcttttgtataaatagtccaattattttcttcatcaacaaaaatttcgtgagttccttcatttaccataggttctattgtgaatatcatcccaggaaccaatagcatctcagtcccttttttagatacataacttacaaaagggtcttcatgaaagcttaatccaactccatgaccacctatttctctaacaacagagtatccatttttctttgcataagagttgatagcatcacctatatctcctaaaaatccccatggtttggcaacttcaagacctttttggacacattcctttgtaacttgaactaatttttttgcattttcattaacattacctatcataaacattcttgaagcatctgaatagtatccattaaaaatagtagaaacatctacatttataatatctccatcttttaagataatgtccttgcttggaataccatgacaaacttcattatttactgatgtacatacacttttaggaaatccattatagtctagtggagcagggatagctccattttgtagtgtaaagtcatgaaccaacttattcatatcttctgtagacattccaatttcgattttatctgaaatataatccaaaatttttgtgtttattacagcacttttttttatttcctcaatttgactttcattttttataatatcatgagttggtacaatatgacctaacttagcaaatgaatctattttattatccatatccatatgacattttttatattttttagtacttccacaccaacagctatcatttctatttaacttcataacttttcatccttcttttattatttatttaaattatgggttacataaactattttaaaacataaccattataaatattataacataaatactaagaaatcctttatagatagtgatttattcaaagtataaattattatatggttattgttgatgaaaagaggatagttaaatgtattattggatattagcgcacttaatagtttagttcaagtttttcaagaaaatcatatgttagaggacaattttcctttaaagtattttttgaatcttcatcaagataataatgcacaaatgattctgcaaaaaattcttctataaacttgcttatatatgcatgtgcaacttgtttagggtcataaagcttatatctttcctgagcaaatacttccataaattcttcagaatttgattttttatttaaaacatttttatctatagcatgtgcagtttcatgtaattctaaattttttgatgaatgtacatttgcatagctagggttactataacctattttagctactatagaattatttctatatataccaggtacatctttccaagtcttgcctgatcttacccaacatggaggtaattgatattttaaatcactaaattctggttcatcagttagatttgaatttattaattttatttttatatccttttctttaagtgtctgtaaatatttaatatttatttttgcaagtctgcttttcatattttcaacttcatctttatcataattcaagtcatcaggaagtataagcatttgttcaattatatctatgctactgtcttttatatcttcagattcttcatcaaatttatattgaagagtattattttcatagatagttatatttgtattattttccatataataagagtgaatatcctctaagtctaaaatattcatttgttgtaaaatatgttttgtttcgccactccatactactaaagaaagtgaattaaaattaattagtggattttcctttgcttttatatcattgcttatatctacatcaaatacatattcaattgagtcttctatgttaagactatctgtattctttttaatatataaatatgcttgttttaagtctatataaatctcatctaaagattcatcataaaattctgataaattattagtaaagagttcttcacttaaaagttcatttttatcagttatactttcaattaaaatattaatttcttttatcatatcgtaaatacttatttttctatttgctttttcactagatacattgcatggcgcaagagcaatgcaataaaaatctttttcttttttataaaaggctttaagtgattttgataaaagtgtaaagtctacacctatctgtaagttgaccttaagtgagtcattttgtaataattcagtattattttttttagctatatttaaattgttttccataatcattgccccctttttattagggtatcataatttttttatatgtgtcaatttgtttttttgaaaattataatttttttgaaaattttattttttataatttgtgaattttttattatagaaataaatatgttattattatgtcaaaatttagcattagattcatgtagagtatgttttatacatatattataattaattctttgaagattgcatattcaaaatacacaccattttttttaattctataatataatatttatatatttaatgttaggatgtgatttaaggtgtattttacatatattataagatgtaaagatgattctctatacactggatataccagtaatatagttagaagaatgaatgaacataagttaggaattaattcaaaatacacaagagcaaagggatttgaaaaactagaagtttattttgtgaccaacacaaaaagcaatgctatgaagttagaatactatataaaaaaattaactagaaataaaaaattgtctataataaaaaacccaagtatacttataaatttaattgataataaagaagattatattattggtaaggaaatagaacaattaacataaatatttatagtaacattataatgggtgcatatagtgtaaaaacttgacaataaatactattgtaatataatgaagttataaatatagtaaattaaaatagctaggggagccaagagctgagaggtataccgacccttacacctgatctggataataccagcgtaggaaagcttagtaaaaattcaagtatgtattatttgtgatatatgctatttctaagctatacctattgtaggtatagcttttttaattaagttatttaaattaaactttaggaggcaacaatgagtaattataaaataccaacacttacaatagctggctctgattcatctggaggagctgggattcaggctgatttgaaaacgtttagtgcaattggtacttatggtatgagtgtaataacagctataacagcacagaatactaaaggagtttttgctgtagaggatttaaataagaaaataataaaaaaacaaatagaggcagtctttgaagatatacctccaagagctgtaaaaataggaatggtttcaagtcctgagattatacttgaaatagttgagaatctaaagaaatacaatccaaaatatttggttgtggacccagtaatgatatctaaaagtggatattatctattaaagccagaggcaaaagaaaacttaattaagtatttgataccacttgcatacataattacaccaaatataccagaggcagaagaaataacaggaataaaaatacataatgtagatgatatgaagagagtaggagaagaaatactacaacttggacctaaatttgtacttatgaaaggaggtcatttagatggagaagcagtggatattttagttggtaaaaatatatttaaagtttataaaagtgaaagaattgataaaaaaaatacacatggaacagggtgcacattatcttctgcaataacatcttatctagcattaggatatgaaataacagaagcagtaaatctaagtaaaatctatataacagaagcaataaaaagaagttttgatataggtcatggagtaggaccagtacatcatttttataaatttgagtaataaaaaaatattggaggtagaatatgtataatttaattaaagatgtaaaaaaattaaatccattggtaattcattatactaataatgtaactataaatgattgtgctaatgtgactttagctgtaggagcaagtcctcttatgagtttttcatatgaggaagtagaagaaatggtaagtgtagcaaattctgtagtaataaatataggaactatgaactcaaatatgttggatttatttctattagctggaaaagcagcaaataagtacaataaacctgttgttttggacccagttggagtatttgcaagcaaagcgagagcagaacttacaagtagacttttaaatgaagtcaaatttagtgttgttaaagggaatgtatcagaaataaagtttataggtggctttaatgtaaggggtaaaggtgtagattcatttgatgaagaagaagattctactgagataataagaaagattgctgaaaagcttgaatgtgtagttgtagcaactggaaaaatagatataataactaatggtaaaggtatatataaaataaacaatggaactgataaattaaaaggaattacaggaactggatgtatgactgctagtttgattgcaagttttatggctgttactgagaatatattagaagcagcaacaatgggtgttcttacaatgtctttaagtggggaattagctaatttaaataatccaccaataggtacatttaaagaaaatcttatgaatgctatttatcaaatggatatagatactttaagtaaaaattctaatattgaatttttaaattaataaagagtaagggagacttaaaatgattgataaagaatctttaaaaaaatgcttaaagttgtatttggtaactgactctgaaatgcttaaaggtagagacttttataaatgtcttgaagatgcaatatcttctggaataacaactgtacaacttagagaaaaaaatgcttctggaagagagtttttaagaaaagctatgaaacttagagaaataactgaaagatatggtgttaagtttataataaatgatagagtggatatagcacttatttgtgatgcagatggagtacatgtaggacagagtgacattgatgtgagagaggttagaaagcttataggaaacaataaaattctaggagtatcagcaagaactttagaagaagctacttgtgcaaaaaatgatggcgcagactatttaggtgtagggtctatattcacaacatctactaaattagatgcaaaatcagcttcgtttgaaactgttaaagaaattaaagaaaaagtagacatgccatttgtgctaattggaggtataaatttagacaatatagataaacttaaatgtttagaaagtgacgggtatgctataatatcagctatattaaaagctgaagatatctctaaagaagtggaaaagtggacattaaaaatataaaattggctctggtagtgaaaaaaatggaaaaatttgatataatctaagagtaaaatttaagcaattataaatgataaacttttctacatatactttttaatcaagatatatgtagatttggttaaaaaggagctataaatgattaagatattgttagtgtgtgttggaggcatgtcttctaccctattggtaaataaaatggagaaggatgcaaaaaaaagaaatatagactgtaaaatatgggcagttggagaaggagatataaaatcggagcttgataactttgatattttacttcttggaccacaacttagatttatgcttgatgacgtaaagtctatagttggagatagagttccagtatctataatagatatggtaaactatggtacttgtaatggtcatgctgtgttaaattcggttttagaaatattaaaataaataataaaagtggattctatataatagagtccatttttattatttgttattaataggcttaaaacttagcttaccatttctttttttaatctccacatagcaagtgaaaaacttgaacagcacaatattaaaaatagtaggataacaggcagtatatctccaataagaatagtctcaccaaatattaagctacgtaaagcgttaataacatgggtaaatggattgagcatcactgctacttttaatcctccagataaactttctatagggaaaagagctgaacttaaaaagaaaataggaagtacaattgcagtcataattgtttcataaactatttcatttggcaataataaacttatagaataagctagacttgataaaaagaaggctgtcataaatatcagtactatcataagtaggattccaccaatgccagattctatccttactgagaagaatatacttactatacacaaaatagttacttctatgaaggaaactaagatagcttctaataattgaccaaggacgattgaatacctactgataggtgcaattaagactctatagaaacttccactgttcttcattataaagtttataataccaccactactacaagaagaaaacacaaccagtacaatgatacctggtagtataaaagcagtataattattgatatttatattattcatagtttggtttgcaatagaactataaagcacaagccaaagaaaaggttgtaatatagtaactacaaatgagattggatttttaaaacgccacttcatactacgccataagatatttaacattcccattcctcctttaagctttttttagaacttgtaagtgctaaaaatacatcttcgagacttggctctacaatttctattgcatcaaattctatatcatgttctaaaagccatttatttattaaagtaaaagcagttctactatcgtttacacttataaaaattgaattttctcgtacgctcataaactttactaaaccagtacttttaattgaatctttatatttttttatatcttcagtattatggaaagttatacgtagtatattttgtctaatgtaactacgtaaacttgatggtgttccttgtgctaaatcctttccattcttcataatacaaatattatcactcaattgttcagcttcttcaagataatgagtagttagaaatatagttgtgccgtactcatctctaatttttaataacatatcccacatagattttcttgaatcgacatccataccaacagttggttcatctaaaaataggattttaggagatgataccatattcatagctatgtccaatctacgttttacaccccctgaatatgatgaagtaggatattttaagtaactagataagtcaaacttatcaattaaagagtctattctttgttttgcaatctgtggttctactttatacattttactttgaaataccatattttccataagggataaatgttcatcaatagagatttgctgtgctacacaagcaatttgagtacgtatccaagaaggattatctactaaatcttttccaaacatttttacatttccagatgtaggtttgtaaaaggtagtcaaaatatttataagagaagatttaccagcaccattaggaccaagtaaagaaaaaatttctccagcatttacattaaagcttagaccatttaaagctttcacaccatttttatattcttttactaaattgtctatttcaatcgctaacatatattattcctcctctttaagtggaaatattatctctgtaatatagttatctgggtttccttttatcaacatacctggtcctttaataaatacttctctccaaggagtttgtatttttatattattttcatgaatatatttaaatatcatttcatacgtttttggcaaattactataagagcctgtgtgagtaaaaaataaagcttttgttttaggaaattcttttgtagttatacccatacgatttggagtttcagcagttggaacacataattccatttctgcaacaccagttttttggtcaacatcatagtagcaaaagaatggtgcaccgttagactttccttttatagctttaaatacatttggaaaatactttgttgcctcagtcataggtccattataacgcatggtagccactgtgactgattcgatatttttgatttcaattttgcaattcatttgtttacctcctaatgtgtgttcatattcttactagatttttaagcattaatacatataagattttgattagttgaaaacatataatcttatctcgtttgcttgttttcaagtctaacataacataaaatatatatcctctcatttgatgctccattttgtaaagctattatttaagctttactttagattttttagcaaattgaaataaagcaatttataaaataagtatttacaaattaagtgtattaatcgtataatacacttaataggatactagataaagtctgaaataaaggcgtatttttttaaagtaagtgtactatcgtattaatacactagaataggaggaatcatgaattttgaattagataatacaactcccatttatttgcaaatagtaaagtatataaagagacaaatagtaacaggagagttgaaaccaggagagacaataccatcaagaagagaaatggcacttaatctaaaagtaaacttaaatacagttcaaagagcatataaggagatgggtgatatgaatataataaatacttttaaaaattatcaaagcagtgtaacagttgatgaaaatatattaaaaaatttaaaattagagcttataaatgaatcactatctgtttttatagaagatatgaaagcaataaatgttagcaaagaagaagttttaaaaataatagaagataagtattagttttttaacaaatagaaaacttagtttagaaagtttatttataagcatattggatgtggaggatagtaaatatgatagaaataaagaatgtcagcaaaacatataaaaggatgcaagggcttaaaataagaaagatagaagctttaaaaaatgtaagttttaatatagaaaagggaaaaataactgcattacttggtataaatggtgttggtaaatcaactatgttaaaagcaatagcaggacttataaacattgatagtggagaaattcgtatagatggagaaaaaataaatgaaaaggtatacaataaattggcttttgttccagatgtacaatctcactttagcaatacaacaataaaagaaacatttgaatttatggaaattttttattcaaagtggaataaagaaaaatcaaaagaaatgatggacatatttaaattggatgaagatgaaataattgataacttgtcaaaaggaaacattgcaagagtaaaattaatacttggattttgccaagacccagagtacatacttcttgatgaaccatttacaggaattgatttgtttaagagggaagagtttataggagtaatagcgcaatatatggaggaaaatcaagccattatcataactactcatgagatagtagagatagaaagtttagttgatgaggttgtaattcttgatgaagggcagattataacttcatttaatgcagaagaattaagagaaagagaaggtaaatctatattagataagatgagggaggtatataagaatgaataaacttctatatctaataaatgtagatttgagaagaagcaataagttttatatagcttatatatcatttttttcattaattacacttagtttaaatttattcgaaattaataaatttaaaaattctaaatttattatgaacttagcaatagaagattttggaggtatattttatggactagggatacttagtaatcttggttttatccaaaatatattgttctttggaatgttgggactttttatatactatatttttatgtggaaaagagagttcttttcaaataatcaaagtatttatacacttatgatgttacctcaaaataagtttaagatttgtatatctaaatcaatagttttgataacaatgatatatggttttttgataagtcagacagcaacattatttatatgtaaatatatatttaatttcatttttagaaatattcctataatcaatatgaactttgccaaagatttatattatttaaacttgaagagtataccaattgattttatctcttttatggctatttatgtatttttactacttatagctatttctattgtaaattgctgtatattatttatcttttcctatataaataaattttatgtaattttaatcactttgctgattatagcaggcttatatttttcaacaatatatataaatataatcaatttatttagaaaatattataatcttataggatttcaatttaacaatttagtagcagggttattaagttttttaattataatgtttattctaaatggaatatcttatttgctaattaaaaagaaagtatctctttaaggaggggtggtatgaaattaaaatctaaaatatctatacttattatatttttgactttagcaatatattttagtataggtttattaaataatgaagataatttaaagataaaaactataaaaggtgactctaatgaattagaccatataaacataaattttggatatgctttgaatggatatataaattcatattatacaataaatggaagtaacaaaactaaaaagactgaattaataaaactacaaaaggatagtaagaacacaaataatttaattgatgtatctagtggttcagatttaattgctcatgttggatttgaaatgaatgaggagtcaaaagatataaactttgtgatagatgagaaaaaagaagatttagaaaaaggtgtatttccatcagaaggtagtgataaagaaattgaatatgaaaaattagatatgaataattttacaaggacaagatataaagtagataaaagtacagatgattattatgcaaatatactagcatcaaaaagatataaaaaatacttatatgtatctgtactttatgctacaagtgattcatcagaaaataacaaagaatattcaagtactatagatataataaaaattaatccagaaaataaaaaaatcaagactataaaaagtataaatttaagtaattatttttccgagaaataccaagacatagagaacataggtgtaagttatgctagcaaatatgaggataagatgtatattttagtaaatgtactaaatacaaacataggtgataatagtaattctaaatttcatttacttgagtataatcttgaagaaaataaggaaagcataatggaattaaaaactgatagcaaaatggctttagcaaaagcaaagttagaagctaataaattatatatggtaatgtcgaatgattatgataatagttcaattacagagttaaatttacttacctataatatattagataaaagcttagatgaagataaatatgttttagataatagagaaaaaagaggaattagaagtattgaaattgattcaaataaaatcgttgcatatacatcaaggctaaactctatattatcttgggataataaatttatgctatatataataaataaaaattctaaggaaattgtatatgaaggagaattacaatttaacagttcaaatagtatgttagaatttgaaataaagtaggtgagttgatgaaagatttaataagattattcgaatttgaattaaaaagaaatataaagaattatatatttataataatttgttgttgttcttttgtaattttaaacatagtaaaaaatttaaatgactataattacataatagaaaatgcagttaaaagtgaacagttaacaaaaatcggaaatacgatagaaacggtaaatgttacaggtttctcaagctttagaaatataatgggttctacagaatcgtggtttatatttggtataattgcatgtatttgctatgctttttttatttggtatagagactttaatggtaggagtaaatctatatatacacttataatgctacctaaaaatagaatcaatatttatatatctaaattattaaatatattatttctagtgtatagctatacagtagtacttacaatatctttgtttattgcaagtaagttgttgcctagacatatgcttggtaatgtcacaaactatggttttgtacaagaaacaatatatgagttaaaaatgttacttccatatagctttgaaatactatttgtagagtatatatttttattgataggatttgtatctgtagtatttacatcaattcttataaataaatctatttataaagtaagcactttaataagttttctatttttagttttggaaattttagtgtttataatttctatagaatttattataccttatgaatacagtgatgtatttactgttctatattcaagtataaacatatttgtatgtagtcttatatctaataaacttttgaagcaaaagattgacttttaggagggatattatgaaagcaaaaaatataggaaaatatacaatatgttttataatagtatgttttttaatgattactatgaccttaatattgagttattttaataaggataaactatctgtaaaaactttaaaaggcaatgtaaaagatatagggagagtaagtgtagtatatacacctaatataagcaaattttcttatgaggaggtaattataagtaaaaatggagtaagaaataataaaaaccccaaatcaagaattagaaatgattatttaaatattgacaaaaaatacagtgattttgttaatgataaaggaaaagaacttatatataaagatgatttgaatataggagaagcgtatacctctgttaagtctgatttagtacaaggaatgaatgctttaaatgattgtataaaggtttcaaataaaaatttaaaaagtggggtagaagaaaattttgatattaatttaaataagtctgattttaaagaaaacagttggaaaaccttgtttaataaaatatataaaggcaatttatatatggtaattagtgaaactaatatttcaggttctaaggtcaataatatttgtatattaaagatagatataaaaaataagtcttataaattattaaatagatttaatttaggattacagaatggatatcaacaaaatatcaatgaaattaaattttctattggaagtaaattatacttagaaatagtaaataataaaagtaaaaatggagatattgaaggacatgatagttactctaaccttattatatatgatatagaagataacacttttaatataagtaataaatttatggataatctaaacaaagaaaagaatgcaaatccaaaggagattggcttattaagtaaaactaagctagattatatgataaaaaataataaattgaatcttatagttacggatatgagtaattccataatcaatcttgtttatgatattaattctaatgagattaaattagaagattatgagatacttgatttaaaagtagattataatgaagcatcatctggagttaggaaagttaagttactggatgataagatttattctatttcaggtatgaagaacagtatatcaggagaattaaaaggatttaaagggattgttgatgtagtcggaactaagccagtaaaatttcaagtatttgatatgaaacttaaaaagaatatttatgaagctgagctaataaatggagatataagtttacaagaaaagttattttttgttgcaaattaagtattagaattaattttagaactttaaacttttatatgtatcacagataagtataagtaagggagtgtctcaaaataaactttttagttcatgagacactttttttatatgaaatcaaatatattttcattgtttagatttattttgataatgaaaaaaagattatctttattttaagaaagacatttatttataattatatacaaaaatattttttaatgtttttgtgtataattataacaatttaatttatattaatgcacttaaatttgaaatagaatgcttatagtggtaaaattaattattagaatattagaaataataaataaataatacattgtacttaaaagggggagaaatttaagatgaacaaaaaatatattaaagcagggaatttaattgatggaacaggaaatagtattatgcaaaataagggtataattattgatggagatactatagttgaaattgaagatataagagatgatttaaatggatatgatgtgtacgattacttagataaaactgttatgccaggcattatgaattgtcatgttcacttgacaatggagccagttggaaatccaaagatatattatgataatgtatcagatgtagagcttgtagtaaatacgataaaacaagttgatgcttatttggattcaggagtaacatatattagaagcttaggttgtcccaaatatgtggatgtacaacttaaaaatcttatagacaaagggtctatagatggtcctggtatagttacttcaggtccagttatatgtatgacaggagggcatggatattattttggtattgaaagtgatggagtggatgaatgtagaaaatcagccagaacagttttaaaaaatggagtagattgtgtaaagataatggcaactggaggtgtaacaactgatggagttgagccagggtcaccacaattaactttggaggaaatgaaggctgctgtagatgaagctataaaagcaggtaaaataactgccacacatgcacaaggaagaactggtataaaaaatgcagttcttgcaggaattacttctatagaacatggtgtttatttagatgatgaaataattgatttgatgcttgaaagaggaacttacttagttccaactgtggctgcaccatattttattctaaatgcaggaaaagaaagtggaataactgaagctactcttagaaagtgtgagattgttgccattccacataaagaatcattcctaaaagcatataaaaaaggaattaaaattgcagttggttctgatgcaggaacttcttataatgaacatggaaaaacatattatgaaatgaagctaatgtcagattatggtatggataatatggatataatagttgctgctacaaaaacagcatctgaacttttaagaattgataaaaattatggaactctagaaaaaggaaagaaagcagatgttatagttgtaaatggaaatccagtagagaatatagacgtacttgcagatgtgttagcagtatttaaacttggtaaaaaagttagataaatagtataaaaataaaaaagagtgtctaaagaaatttttaaataattatagacactcttttttattagtaataattaaatcttttatactttagaaaatagattctattttatatttagatataactctttaaaatcattcttatgcaatataatctatagaatctacacatacaaagtatattcttgaatcattagaatttccaagtactataacatcatttttcttacctagaacttcaacaccagttagaaccaaactaccagctactacagtaacttgattatttatatttgacatataaagattatctaggatacctttattacaacagcaatcatcacaatcgcagttacaattacattctttgtaatgttttttatcaagatagtaacctaaagatgctatgaaatcttcataatctgcaggtgtaatatcaaatgcaacagctttaagattacacaatgatgctaaatctacgtttgctaatggagtagatgcagcaagtataaaatcaattatagcagcaagtattgcatctaatatagccccaaggtctatcgtaggaggaataactgcatcaataagtgcaattaattcagctactcctggtatagttcctatagtattaattaatccctcaagagttaaagggactggaataggataagatactctaccagctatatctattaaatcacagttacaagcagaaaatctttcaaaagtaccatcaagtccagataaattatcttttggaggagctgaaagatctatacctaccaaattagcacctactataaagaaatctgagataaaagcaaattgattaaagtttacaaaaggtcttagagcatcatatcttagaagttctaaggcctctctcatactttttttacaacaacattgttttattttaggttctttatatttatttggataattatagtatctatcagctacttgataattttcatagtatctttcatttgtatttggataatcttcctcatattcttgtgtaaatctaaagtcctctctacatttattattttccactaaatacactccttttatattttaatttaaatgtatagataattaagcttatctatatagtaatattatatttataatgtaaaaaaatgttacaaaagatattataaacgaataaaaaataataatttgtcagataaacttgtaaatttttatgaataatccattctaaaacaaaaaactgtgtataaaaaaggtttatatgttatatttatataaatataacatatgaacgagaaaggagtggtttgataaatgattgaggtagataaattgtgtaagtcttttacaagggttgtaaaagatgataagaataaaagttcaataagaaagctaaagaaagtaaaaactaaaaaagaagaattttttgctgtaaataatgtttcatttaaagttatggaaggtgaaattgttggaatattaggtccaaatggtgcaggaaagactacattacttagaatgttaggtggcatattaacaccaacatcaggaagtataaatatttctggatatgattattcaatagatagaaattcagcaaaaaaagaaataggttatctctctggaaatacaaaactatatggaaggctttctccgagagaacttctaacaacttttgcaagtctatatgagatgtcaaaagaagatatagaagaatcaattgaaaatattgtaaaaataatggatatgagtgaatttatagataatagaattgaaaatctatcaactggtcagactcaaagaacatctatagcccgttgtttaatacattctccaaaagtatatatttttgatgagccaacactaggtctggatgttttaagtagtgcatctattatagattttatgaagaatgaaaaactaagaggaaaaactgttctttactcaactcattatatggaagaagcagaaactttatgtgacaagatttttatgattcacaatgggaaaataattgcatcaggaacaccacagagtttaaaagaggaatctggagtaaataatttgagagatgtattcataaaacttgccagaaaggaggacatttaaatgagaagtaagattgtaaaatacatatttaaaaaagaaatgttagacatattgagagataaaaagactttatttatgatgattgttgtgccacttcttttatatcctttacttatgttattaatgattcaagtaatgaatatgtctgcaagtagtatgaatagtaaggacattaatatagcttttaataataaacctaataaggtgttagtatccatgattgaagatgataatttagaaaaagatactaaaaatacttcaaatgataaaggcaaaataagagtgttagatgtagataactataaaaagtcattagaagaaaataaaattgatgcttatataaagatggaagaaaaaaaatcatctataaattatcaaatatatataaattcttctcaagaaaattcttctaatgcactaaaaagaattgaaactgttttggataaatataaaagatttaccatagaaaaaactttatctgaaaaaggattagatgtacaagctactttagaaccaataacatatagcactgtagatgttgcaaagacggaagaagtggcaggatactttttaggtcagatacttccatttatattaataataggagttttactaggttcaatatatccagcaatagatgttatggctggagaaaaggaaagaggtacattagaaacattatttacactcccaatatcaaacttagaactggttatgggaaaatatatggcagtttctcttagtgcaatagtaacagcaattttaaacattttatctatgggactgactatggcatttattttagttagtggaggtattagtagccaatttggctttggaaactttaattatggagacttagtcttaccaattataactactttaatttgcatatgtcttttttcaatggtagtttcagcaataagtatgtgtgtatgttcattagcaaaaagttttaaagatgctcaaaactacataacacctcttatgttaattattatgataccatcatatgtttctatgataccaaatatagtattggatagagtgacagctgtaatacctgtagtaaatatatctttacttataaaaagtgtattatcttttaaaagcgatttaaatttaatagccttagttttagcatcaaatgtagcctttgttatattggcaatcatactactgtctaagatgttcaattctgaggaaatactttttggtaatagtaagagtttttctttcttagagaaaagaagtaatataaaaaaagggtctataccaactgtaagtgatggtgttattttatatgcagtaggattagttctattgatttatgttggttctttagttcaaattaaatttggtatggcaggtattataatgacacaattcatgataatttctttaccattattatttgcatgctatattaaagctgattttaaagaggtatttagcttgacagttcctaaattaaagcatgtgtttgggagcattgttctttggattggtggatacatacttattatgattataacacagctaattttattcttatttcctcaaaatatggaagttgctgaaagtttaaataaggctctttttatcaaagatagtgttttactgaatttactagcaatagctttattaccagctatatgtgaagaactgttttttaggggatttatattttcttcatttagtaaatcaaaagataaaaataagtctatcaaactcgctataatatgtagtggggtactatttggtattatgcatatggattttattagaataattccaacatcaatattaggtattatatttgcatacagtgtgtataaatctggttcaatatttgtatcaatgttattgcattttttaaataatagtgtagcagttgtgttaaatcattatacaactggaaatataaccaacttatataaatttgttgaagttgatttttcgaacttaaatgtacttaaatttgccttaattcttctaataagtcttatattaattatgttaggattaagagttttagatagaaagtctttaagaaattaagtataaagttattatatagattaaaatattaataagcactaaagtatatggatatatcttgtatataaaaatactttagtgctattttatatattttaattatatgaattatttatcgtttcatttatgtaatgaaaatgttatataaatgaaacaataaataatttttattttagaaatttatatttaaataatcaagttgaaagtgagatactaaaaaaattaatttaggaattatttgatttattcatttataaaaattaattactgatttgtcgaaaccattgtaataagaaaaaaatgaaaaaataaagtgtgaatatgttgcaaatactgtattttaataaaaagtagtcatttcttgtaaaatggatagtttatatctactttaattttgtaaaattttctgctactataattatagaatgtagcatattcattgtcttaactattgatttatatatttcatataggtataatagaaaataaattggattattttggcatataattatttattaaaaggtgattatttttgtttgaattgtctgaaaaattttatttttatattataattttaatattttcttttcaaaactatccattttacaagaaatggaaacttttgagatgtacttatttgctaataaaatagaggtgttttaatgggaggaaatttttatgaggaatttacaaaaaaaattgatgttttttttatttatttgtataattttacaaattacatacacaacaccagtctattctttatgcaaactctataaaaacaactccataaataactttgagtctattgtgtctaataatcagtttattagcaaatatgcaatacaaataatacttattatggctataatatgtatgatgcttatattctatataatatatgacaaattaaattttaaaattaaattgcaaaagatagcatatacagataatcttacaggagcaaatactatagataaatttgtaattgatgctaacaaaatactatgtaaaaatactcaagtaaagtatgctttattatatatagatattgataaatttaaatatataaatgatttatttggatatgaagttgggaatgaaattttgcgtaatttaacaaaaattattaagagtaatatatttgaagaggaaatgtttgcaagaatatctgcggataattttattataattatgaaatatatagaagaagaagatataacaaagaggttaaaaactatatttgaggaattagacttgtttaataataatcaagaagaaaagtataagttagttttaagttgtggaatctattttatacttccagaagatagagatatcaactcaatcatagatagggctaatatacctcataaaatggcaaagggaggacataaaagttcatatgcattttatgataataagattcatgaccaagagataaaagaaaaagagatggaaaatacaatgttttcaagtttagaaaataaagagtttattatatacttacaacctaagatagatcttaatacaggagagatacaaggttcagaagcacttgttaggtggaaacgtcctgataaagggctaatacctccaaatgaatttatcccattttttgaaagaaacggttttgttataaatttagatttatatgtgcttgaagaagtatgtatataccttagaaaatggattgatgcaggaataaatccagttactgtttcagttaatgtttcaagaatacatttatattgcaataattttatagaaacatacaaaaatataattgataaatacaatatacctgcaaagtatatagaacttgaattaacggagagtatcatatttgataattttgatattttaattgatataatgaataatttaaaaaaaataggatttttaatatctatggatgattttggttcagggtactcatcattaaatatgttaaaagaaattcctatggatatcttaaaacttgaccaaaaatttattatggaaacttataatagtaaaagaagcaaaataattgttactaaagtaatagaaatggcaaaagagttgggtatgaaagtcatatcagaaggagttgagacagaagaacagtttaaacttttaaaagaagtaaagtgtgatatggcacaaggatatttgtttggaaagccaatgccaattgaagaatttgaacatttaattgtatccaacttggtaagagggtaattaatctgtaatataaagaatttaataaattgtgttaaaaatggactctaatgtagtgttcattttttttgtgaaattttttatacttttactaaaaagtaattgacatatactttgtattattatattattgtattaataaattaatacaataatataataaggaggcatgaacatggaatgggaacttgataataacaaacctatatatatacaattagtagaacatttaaagttaaaaataatttcaggggaaattaaaataggatctaaattagaaacagtgagagcactagcagaagatgcggaagttaatccaaatacaatgcaaaaggctctaacagaacttgaaagacaaggtttagtttatagtcagagaactaaaggaagatttgtaacagatgataaggaaaaaataaaagctatgaaagaggaaatagctaatgtggagataaatacattaaaagtaaccttagaaaagcttggatatgatagagatgaaatgctaaaacttattacagaaaatctgaaaggagaattataaaatggataaaaatataagcaatgtttctcaagatggaatagttgaatttaaaggtgtaaacaagagttatggaactaagaatgttttaaaaaatattgatttaaatataccaaagggaaaaatagtcgggctgttagggcctaatggaagtggtaaaagtacaatgattaagctaatgaatggattattacagcctgataatggtgaaattatgataaatggaatgaaaccatccatagatactaaaaaaatagtttcatatttaccagaaagaacttatttaaatgattggatgaaggtatcagatttacttaagtttttctatgatttttatagtgattttgatgttagaagagcaaatgagatgattaaaagcttagatattgatgtaaatgaaaagctaaagacaatgtctaaaggaactaaagaaaaagttcaacttattttagtaatgtcaagaaatgcgagcatatatatattggatgaacctataggtggtgttgacccagctgcaaggtcatatatacttaagactatattaaaaaattattctgaagatagtactttactgattgctacccacttaataagtgaaatagaaaacatatgtgatgagataatattcatatcaaaaggagaaatagtgttacaaggagacgttgaagcaataagagaagaaaaaggaaaatctatagatgcattatttagggaggaatttaaatgttaggtaaattattaaaatatgagttaaaagcaagtggaagaatatttataccgttatatatagccatattgatagtagctgtatttaatggaatatttatgaatacaaatatacttcaggtacagggaataggaatactagtattaacaagtctttttatggcattaggagttttaactattgtagttacaattcaaaggtttagaaaaaatcttttgggggatgaaggttatttaatgtttactcttcctgttagcactagttcacttatattatctaaatgtataacagcacttatatacgctgtacttagttttatagttgcagtattcacttttggagttcttatgctttttggtacttctggaattttactacctgaaattttagatttgtttaacactagttttaaatggatttctgaaaactttttagatattttattattagtagtagtaatgtttatttcatattcatcatttattttgttattatatacatcaatctcaatgggacaattaccaaaattcaataaacatagaaacatagtggcatttgcttcttttatagctataaatatagtaatatcaattgttggagatgcagttggaagcatcttaccaaatgaagatacaaatatggtatatcatctttatcagagtcctagttttatgcttgcaatacttggtagtcttgtagttgcaatagcgttatttttcgctacaaaatttatattagataaaaaattaaatttagaataaatgtttttatatggagccatcttttgagtaatgttaaaagatggctcttattatttatgtagttaattcatgtatataatatgaatagtattttatttctagttaaatatatacatatgttgtataatgatattgcgtgtaaaaatttgtaagaataactatacactttatataagttatatcaagaaaatttaaaaatatatggatttgagggagaagatatgaaaagttatacaaaggctaagtggagtgtttggggtataattacattttcatttgttttagtattatttttaaggatgtcaactgctgttgtttcagacaatttagcaaatgagttaggttttaattctatacaaatttcaaatatagcatccttttgcctatatgcatatgcatttatgcaaatacctgcaggaattttgattgataaatatggagcaagaaaaattagcagtcttggaataataatggcaagtttagggtcaattttatttggtttgattcaaagtatagaattagcatatatttctcgtgtaattgtaggggcaggaacatcagtaatattactttgtattttaaaaattcaagggagatggtttaataagtcagaatttgcttctgcaacagctaaattttcatttgtaggaaatttaggtggagttcttgctacttttccacttgtgtttttgtctgaacttgttggttggagaaattcatttttattaatcggtataattggtgttgtaattggatgttttatatatattattgttagagatacaccaaaagagtatggattcaatgtagatactgaaccctatgaaaagtcagagaaggttaatattgttgatggtattaagtctgttataaagaacaaatcaacatggtataattcaatgataatgttctcttttgttggtcttacaagtgcatttataagcttgtggggagtaagatacataatggacgtttatggtgtgagtaagagtttttctgcgtttatagtatcattttttacatatggatttatatttggttcaataattatggattttgtatttgctaaaataaggtctagcaaatttaatataataaaatttggagcaatgatagatttgtttatatggattgtaattgtagttgtataccaggtaaaaccaccaattatagttttaccaatatcattctttattatgggatgtatagttatgtcacatctacaggtttttaatgatgccaagtataaaaataaagaaatttattctggactggcaactagtgttattaatacttttgaatttataggaagtggaattattaatttgattatagctatctctttacaagtaaattcatataatatagttgatggatataaaaaaggttttgtagtatttatagtactaagtattataactatagtatcatctcatataggggtaaaaaatgatgattgtaaggctatatagtgttttattaatagtttaatttagtattatattttgcatatatataacaaatagtttgcattttcctaagatgtataattggaatataaatcttgtttactatgtacaaatggtattgtattatattaaatagaaaataagaactttaaactataatattggttctaaaatataaggtaaggagttttttatggatacgacgaaaatagatgatataagcaagttagatttaaataatttagacattaataagatggatatgggaggtataatggaaagtctgctagaatgggctactacaagcggagtaaaacttataataggtatacttatactttctattggatttaaaataataaaaaaatttgtaaaccatgttatgttagtacttagtaaaagagatattgatttaactttaagaaggtttttgaagtctcttcttttgagtgtacttaaagttgccgttataatcattgttctggaatattggggaatgagtttgtccagttttgctgctgtgatagcatcagcaggggtagcaataggtttggctttacaaggtagtctatcaaattttgctggaggatttattatactattgattagaccttttaaagtaggagattacgtagaagcagcaggccatggaggaacggttgaacaaataggacttttttatacacaattggttactccagataataaacagatacttatacctaatggttctgtatcaaatgatagtctaataaactattcagcaaagaatactagacgagttgatttgacttttagtgtagggtatgaagatgatatactacatgttagaagagtacttaaagatattgttaataatcataaattaataataaatgagccagaaccatttataggagtagtagaacatggagataatgctgttaaatttgcaactagagtttggtgcaagacagaagattattggacaatttatcttgatttactagaagaggttaaagttaggtttgacgaagaaggaattacgattccatatcctaaaatggatttaacagtaaaagaattaaacaaaatttaattttttaatatagtgtttaaatttaagaatataatatagatatacttataaggtttgtaaaaaattaataagtactgttattttgtaagtaaaaatataaaagaatgggagtgtctcaaaatgaactttttagttcatgaggcactctttttgtacgaaataaaatatatttttattatttcaacaatgaaaaagatgcttgtttctattttgagacagtataatttttatgtaactttaattttagtaaatataaagttttaaaattgataaaataggaggaatttttaatataaaagggtaaataaagggtttagagggcataatatagaataaattaatatatttaaggaggatttttatgtgtaaaaaaacgtatttattagtggtaagtatacttatagcaggtttattaactgcatgtagtgggagcccaactaaggattcaggacaagcacaagataatacaaaaaaggaggcaaatgcttcaaataatgctttaaaagatgaaaaaaataatgaaaatttaatggaacaagattttaaagtgccatacacagatgcaataaacatatttaaagataaatacaaggatgctgatatagtagatttaagtcttgagagagatttaaataaatttgtttatactgtggaaggtgtagatgataataatgaatataagatgaaaattgatgctaatacaaaagatgtattagaagataaaacagaaaagttagattcagaagatttaaatggagttgctagaaaagaaaaattagatttaaatgacataattacacctcaacaagctatggaaattgcattaaaagaacaaaatggaatggttaaagaatggagtttagacaaagatttagatgttactttttataaaataagaatagataaagataaaaatgaatatgacataaaagtagattctaaaaagggaactgtattgaaggtagaaaaagaagattagaagatttaaactatctttaaaataatttcttttttgaataaattttgtttaaaatataacaagcagggtataaagagactaaataactattttaggaggagtacggtatgtcattgaaatcactaaaaataaaagaaaatttatattgggtaggttcacttgaccctgatttaagagtatttgacataattatgtatacaccttatggaactacttataattcatatgtattaaaaggaacagaaaaaacagttttgtttgagacagttaaagataagcattttgacaattatattgaaagattaaatgatttaaatatagattttgaaaaaatagactatattgttgtaagtcatactgaaccagaccatgcaggaagcgttgaaaagcttttggatttagctaaaaatgcaaaagtagtagcttcagaaacagcaattaaatatcttaaggaaatcgtaaacaaagactttgaatatgttgcagttacagatggagatacattatcaattggggacaaaactttagaatttttctctgtacctatgcttcattggccagatactatatacacatatataaaagaggataaaactcttgtaacatgtgattcatttggtagtcactatagtaatgataagatagtaaatacacttgatgaaaatgaagaaaaggattacttggatgctttaagatactattatgattgtataatgggtccatttaaaccatctatggtaactgctatagaaaagataaaagatttagatatagatactgtatgtccaggtcatggtccagtattaactgaaaatcctagaaaaattatagacctttattataactggagtgtaaaggaacaaataaagttagaaaaagaagttacaatttgttatgtttctgcacatggatatacaaagattatggcagaagctataaaagcatatattgaaaaaaatagcaactataaagtaaatttatttgatgtaatagagcataagcaagaagatattttggcaaaaatagcagtatcacaaggtgtattatttggaacaccaacaatattaggagatgcgttaaagcctatatgggatatattaatatcgttaaacccagttcttcatggtggaaaagttgcttcagtatttggttcatatggatggagtggagaaggtatagaaaatgctatggagagaataagtcagcttagaatgacagcagtaaaaccttttgctgttaactttaaaccatcaaatgaagagattgataaattacattcttatacaggtaaattcctagataagttaaattctacttttggaagtaaaaagaaaactaagaaatttaaatgtgtaatttgtaatgaagtttttgaaggtgatagtgctcctagtgtatgccctgtatgtggagctaaggaagaccaatttatagaagttgaagaagatgaagttacttttagaaaagatactgatgaatatttcgtaatagtaggaaatggagcagctggtttttatgcagcagatgctataagaaaaagaaataaaacttgtaagataactatgatttctaatgaagatgagttgacttactatagacctgcactttctgatggtataaatgaagaacttggttcagatttctacatggaagataaagattggtatgataaaaataatatagtagtaatattaggaacgaatgtagataaattagatgaagtgaataaaactattatagtgaatgatggagctattaaatttgataagcttgtaatagctacaggaagtagaaactttataccaccgattaagggccatgatttagaaaatgtgtttactcttagaaatataaaagatttatatagtgtaaaagaagcactagaaaaatctaagaaagttgtagtgattggtggcggtttattgggacttgaagctgcatgggaatttagactaaaaggattagaagtagtagtagttgaagccatggatagcatactatcaaaacaacttgataaagagggtagtaaaatattagaacaatgtgtaagagatacaggaatagatgtaagattgggtgtagcagttgatggtattgaaggtgatggaaaagctcaaaaagttgtatttaaagatggagatagtgttgactgtgatatggtagtattttcaattggtgtaagagcaaacactcaaatggttcaggatacatctgtaaaaattgatagaggtattgttgtagataagacattacagacaaatgttaaagatatatatgcttgtggagatgttgcacaagtgggaaatattagtttagcaatatggccatcttcagtagaaatgggaaaaatagcaggagcaaatgcaagtggagataatttgacatttgaaagtgaagtatatccagtttcattagatgcaatgaatgtaaaagtatttagtattggtaatatacaaaattttgataaagaaatttcatcaaaagatgaaggtcaaagaatatataaaaaattatttatgaaagatggttcattagttggagctatacttataaatgatttaagctgtactgttaaattgataagattaatatctgaaaaaggtgattttgaggatattatgaaggctgatatactataatttaaatacattaaaataaaaaggagttgtctcaaaattgatttttttctaatcaaattttaaattcaactccttttttgaatttttatataaaataacatggaaattttagtaatgtctgtggttacatacataggtttaattgttttttatatggattgtctctggtataataaattgaattgtgtttgactgatagatatttttattgaaagttaatacctgttatgcgataataaggacgtgttaggggagtttttataataacaattaatctcagtttttgtgttccaatagtagcatcaacacattctgatgtagtagttcttttcttataaaaattagttacaaatatgcttgtaattatttgatatgtaaatttaccaatattataaatgatgacctcgataataaggagagtgaaaaataatctatgaacgaaaatattttgattgtggatgatgaaaaagaaatagcagatttaattgaagtatatttaaaaaatgaaggttttacagtatacaagttttatacaggtaaggaagctctagaatgtattgaatctaaagatttggatatggctattttagatattatgcttcctgatattgatggatttcatatttgccagaaaattcgagaaaaatactattatcctatcattatgttaacagctaaaattgaagatatagacaagataatgggtttaaccataggtgctgatgattatataacaaagccatttaaccctttggaagttgttgcaagagtaaagacacaattaagaagatatatgcgatataataattcttatgaacaacagtcgataattgttaatgagtatgatattaaaggattgattatcaataaagaaacacataaatgtagtttatttgggaaagaagtagcattaacaccgattgaattttctattctttggtatttatgtgaacatcaaggaaaagtggttccttctgaagaattgtttgaagctgtatggggagaaaaatatcttgataataataacacagttatggctcatatagggcgattacgtgaaaaaattcatgaaccttctaaaaacccgaaatttataaaaactgtatggggagtaggttatacaattgaaaagtaaaaatattaaagtcaatcctgactttactcaagtgagaaataaaatttttatgagaacagctttaatggcatttatagccattattttcatatggattttatattcttttatattgtatggtaagttttctatctggatagtatcattctttgaaaatgcttttcgtatggaatataaagctgcattgaatttatatcagcagattttccgtaatagcatggagctcttcatgatactagctatggtgattgtgttttttataatattccgtgtttatttaaattggtttacaaaatattttagtgaaataaatcaaggtattgactctcttatcaaagaagatgttggagaagtggctttatctccagagttattggcaatagaaaagaaaataaactcaattaaacatatacttgaacaacgtaaatttgagacacaaatggcagaacaacgtaagaatgaacttattgtttatcttgcacatgatttaaaaacaccacttacatcagttatagggtatctgacactacttcgagatgaaagtcagatttctgaagaactgcgaaaaaaatatttatctatttcgttggataaggcagagcgtcttgaagatttaattaatgaattctttgaaattacaaggtttaatttatcaaatatatcacttgaatacagtacagtaagcttaactcgtatgcttgaacaactaacatatgagtttaaacctactttgatgagtaagaatttaaaatatacactgaatgttacaccaaatatgatgataaggtgtgatgttaataaaatgcaacgtgtatttgataacttattacgaaatgctgtttattatagttttgaagatactactattgaaataacagctgtacaggaggatgattatataaagcttaaatttataaatcatagcaatacgattccagaggaaaaacttgagcgtatttttgaacaattttacaggttggatacatctcgtaattcaaacagtggtagagctgggttgggacttgctatagctaaagaaatagtggagcttcataacgggacaataacagctcatagcgagaacaatataattacctttaaggttattattccgattgtaggaaatttgtaagaatttaagtataaaaaaataggaaattctttaggataaataaataaagagcactcttgttattgatataattactgtatcaaaacaagagtgcttttattttgatacagtaattatatcaatagaaaaatgtgaaaatatattatgtggaacagatgcaattgtaagtgaaggttgattggatttgaaatagaaaaagtattttaacatgtttctgtagattgtataaaaataaataaatcaacaaaggagaatcaaagatgaataataaaaaaattgcagttatatttggtggaaactcaacagaatatgatgtatcattacaatcagcttttgcagtacttgagaatttgaatacggaaaaatatgatattataccaattggaattacaagggagggtaattggtatcattatattggagattataataatatccagaataacacttggtttgaaagggatactgatataattccagttattgtttcgcagaaccgtgtcaaaaatggtattattgaatttttaattcctgatgctgtttctcagaatcatattccaaatagtgctattgaatcatgtgaaaatgatattaaatacactaaacttgattttgtatttcctgtattgcatggaaaaaatggagaagatggaacagtgcaggggttatttgaattggcaggtatacaggttattggatgtggtactctttcttcagcattatgtatggacaaagacaaatcacataaacttgttcattcagaaggtattaaagtaccaaaatcaatattactaaaatactcagataaatttaatgtggctgaactgtcaaaagacttaacttatccattatttataaaacctgtgcgtgcaggttcatcatttggtattagtaaaatttataaaaaagaagagttacaagtagcagtagacttggcttttgaacatgataatgaagtaataattgaggaaaatattgatggttttgaggtagggtgtgcagttttaggaaacgatgacttacttgttggaagagtagatgaaatagaattgtcaaaaggattttttgattatacagaaaaatatacattgaaaagttcaaaaattcatatgccagctagaattgatttggattgtgagaaaagaatacaagagacagcaaaaattatttatagaactcttggatgttctggatttgctagagtagatatgtttttaactccatctggtgaaattatttttaatgaagtcaatacaattcctggctttacttctcatagtcgttatccgaatatgatgaaaggtattggactgtcttttgaagaaatattggataagataattgaggtgtacataaaatgatgaataatattttattagataaaaataaagaagataaaatgacaaatactatcttattgactaaagataaagtttatgatgggaatctaattctagtaaatgcttttttaccagttaaaacatctgaagatatagatttaattcctgtagatacaaggtttccaagtattcttatgaaacgtgaagctacaaatattttacaaaatattttaaaaagtatatgtggaataaatgaaatagtacctgtaagtggatatcgtactgcagaggaacaacaagatatatattcaagctctctgcgtgacaatggaaaagactttactaaaaagtttgtagcacttccaaatcacagtgaacatcagacagggcttgctattgatttagggttgaagaaagaggttatagattttatctgccctgaatttccttataatggtatttgtaatgagttccgtaaggcagcactacattatggttttatagagcgttatcagtgtaaaaaagaagaaataacaggaatatctcaagaaccatggcattttcgttatgtcggatatccacattctgagattatcaataaaatgaatctcgcccttgaagaatatatagaatatattaagagattttcgtatacaaattgtttaaaaatagaagataaagaaaaaattatagaaatcttttatgtgcctattcatactaaagaagaagtgagaatctctatacctgaacaatgtgtatatcaaatatcgggtaacaataaggatggttttattgtgacattttggagaaatagaaaggactaagaaatggaggaacaagaatgattaggaataaatcttatgcagggcttgattattttaggattatagctgcattacttataattgcaattcatacatctccattattatcatatagtaaaatggctgactttgtgttaactagtataattgctcgtattgctgtgccattcttttttatgctatcaggcttttttctaatttcaacatataattataattgtaataaactgaaatcttttctaaaaaatgtattatttatttacgggatagctattgtaatttatattcccttaaatatttacactggatatttttccatgaataatttagtgcccaatattattaaggacattgtatttgatgggactttatatcatttatggtatctacctgcatcaattattggtgcaagtattgcatactttcttgtaaaaaaactaggtttaaagtactcattagtaatcactattgttatttatgtaattggtatgtttggtgatagttattatggttttttagaaaaaataccactattaaagaatttatatgggtatatttttgaagtatcagattatacacgaaatggtatattttttgcacctgtatttttcatacttggtggaataatatctaataaatctaattatatgtcaactaaaaatagcttgattggatttcttatatcattcttacttatgttatgtgagggaatgtttttacataaactaggggtacagcgtcatgatagcatgtatattatgttattgccatgtatgtatttcttatttacagccttaacatttttaaaaggttctcgagctaggttattgcgaacatcatcattaattatttatattatacatcctatgatgattgttgttattcgtatgttttctaaaatattcggaatacaaactgtcttggttgacaatagccttattcattatatagtggtaagtatagcatcttttatagcttctataattattatattgattcttaaacctctaaaaaaagacttgaaaggagaacataaggtaaataccaatagagcttggattgaaattgatttaaataatttggaacataatgtaaagatgatacaaaaagctatgccagaagattgtgaattgatggcagttgtaaaagctaatgcctatggtcatagtgcttttgaagtagcgacttgtgcaaaccaaataggtgtaaaagcatttgcagtagcaacaatagatgaggggattgatttacgtcgatatggaatactaggagaaatattgattcttggatatactaacccaataagggcaaaggaacttcataaatacaatcttacacagagtgttattgaccttaatcatgctatctctttaaacaaacagaaatacaacataaaatcacacattaaaattgatacaggtatgcacagactgggttttgatgttaatgatgtgaggtcaattttaaaggcatttaaattaaaatacttagatatatgtggcatatttacacacttgtgtgtttcagatagtctgaaagatgaagatgtagactttacaaataaacaaattgaatgtttttataagttaattgattttctgttaaaaaaaggtataaaaattcctaaagtacatattcaaagtagttatggtttttttaattatcccaatcttaagtgtaattatgtaagaattggaattgcattatacgggatattaagttctccaaatgatacgactaaattgcaacttgatttacgacctgttttatccttaaaatcacaagtaattcttattagaaaaatacaaaaagatgatagttttggatatggaagagtctttattgcaagcagagatagcgtaattgctatattatctattggctatgccgatggtatacctagaaatttatcctgtggaaaaagttacgtaataataaatggttgtagagcagcaatagtgggtcgaatttgcatggaccaacttgctgttgatattacagatatacctaatgtagaagttggtaatacggcaataataataggaagagataatttatctgaattatctgcttctgaagttgcaaataactcatgtagtatatcgaatgaattattgagcagagtaggaagaaggttaaatgttataaagaagtaactcaattaaatagtaatatttgttgtactgtgtaatttattttactctgactagacatttttagtaatattatgtctaatatatattttttataacttacatgacaatttaagttataaaaaggtgatgtttcagatttttattttgaaacatcaccttttttgttataatatataataaaataattataccttaactgtaaacttatatagattatttactttttaatattagattcattttttgagattggtatataataaacatatagagtatataataatagttaaagttaaaaaaggggaaaagcaatatgcagtatatacaagaattacttgatttgactcaaaattattgggtgttagccacaataatcggcttattaagtgcatttatagaaagctttataccagccttaccacttgttgctatagttacagcaaatgctgcaatacaaggattatttattggatgtttgttatcatggattggctcaggacttgggacaacttcattattcttattaataagcagatttaatgatagtaagctttttaataagttgagaaatagtaaaactgaaaaagcaataagttggatggataaacagggatttaagttattatttatagcgtatgcctgtccatttatgcctggttgtttagttactatcgcatcagcttttggtaaaaaagatttaaaagattttgtgccagcaatgttggcaggaaaatttgtaatgtttatagttataagttacgtggcaagtgatatagaaggttttataacaagtcctttaaagatagcatcatttatattattggtgtttttgtcatggaagattggaaatagagtaaataaaaatcttgaaaatcataattatgatttccatcataaaaaacatcacaatgataaagatgataaaatgatttagcttgtacgaaataaaacgtatcttaaaatgatttagtactaaattattttaagatacgttttattttttgtattaaggtacaaaatttttagttcttttgtaaactaaaatatataaaacttatttatacttagttcaaaatattgttatttattttttctacaactataataaaatataaaattgatatccaatcaaaaaaataactatgaaatttaatagcttagatatgaatttttctgtttttgagttagtttttataggtagtaaagaaatgtttatggtaatgggataaaacaattcaataccttctttagtaataaggtcaagacacaagtgagatagatatcctattataaacccactggacaaacatgagaaaactatattattgttagtgaagattgtcagagatttaaaaaaactataaataagtaataaggcaattagactgtgagtaaaccctctatgtctaaacctacttccaaataatttgtatattaacataaattttttacttatgtaagaacctctcatatctatatctggaaataaagaacctaaatatgcaaaataaatataaattataattaatactattttatatgcaatatcgtatttaactaggtacagattgtttataaaggggagtatcaaaagtgcgaatatataacctcccctttcatgtgtttcttttatcatataaaaatcctcctgaatcgtcactataaacattatattggtaaatttagactatcttttattatattatatagcaaacataagtttttttcaaaaggattttaatatttaattaatcttgagattttaaatttttgtaattttctaaagcaccattccaatttactacattaaaccagttgtcaatgtattcatttcttctattttgatattttaaatagtaagcatgctcccaaacatcaagtcctattataggagttaggtttttacttacagggctatcctgatttggagtagtcataatagataatttcccatctttagtagctacaagccaagcccaaccagaaccaaagacatctaaagcagatttttggaactcttgcttaaatttttcaaaagaaccaaagtctctatcaatagcttcttttaaagattcagaaggtatggttttttctggcgtcattatatcaaaaaagaatttatgattataagctccacctgcattatttcttacagttgtagcaatatctttaggtaaagaatctaaattttgcaataattcacataaagaataattataaagctcaggatatttttcaagagcagcatttaatttatcaacataagcttgataatgcttatcatgatgcagtttcattgtttctttatctatataaggttcaagtgcatcatatgcataaggtaatggtttaaccttaaatttgttattttcaggtgtaaaagcaaatgaagttatgcactgtgagattataaataaagacataataactggtattaatatttttttcttcataaaaatcacctcctaatatagtatttctagaaataaaaaaaatatgaaatattaacagataatttataagaatttaatagcaatttcattttaaattgaataagttttaaagccaaagacaaaactatgaaatatagaataagactaaaggacagaaaggaattttgattatatggacggcaatatttcaatttattataaaggtgatatatctaaaaaagaagatattaaatttaaaataaaagaatctgtaaataatacaagactttctagtagaatagagtataaggatgaggaaaaaacttttgattttgaaagatttaatgtaattgatgctatttatggaaataaaccatttgaaaaagatggaaaagttattgtttttaatggaaatatatataactatcatgaaataaaagaagaattaattaaaaaaggacacaattttactacaaatgatgatattgaagtcttattggcatcttatatagaatttggtaagaattgtgtacataagattaaaggaatgttcaactttataatctatgatagagaaaatgaaagtatatttggagcaagagatttatttgggataaaaccactttattatataaataaggaaaatgcaataattttttcctcagagtataagtttttacttgaatatatgaaaaatttaaatataaatgaaagaagcttacaaagttatttttcatttcaatatgtacttcctgaagatactatgatacaaggaataaggctgataccagcaggtcactattttagggtagaaaatggtatactatctttaaagagatataataaacttgagtttagaagtagtacaaaatttttttatactaaaaatcacttaggcaatagagatgtgaatgaggatgatataagaaatatagtagtagattcaatagtaactcatatggaagaggagaaagaaattggaacatttttgtctggtggaatagattcatctattataactactgtggcttcacaaattaatccaaatataaaatctttttctgcaggctttagtgtcaaaggatatagtgaattagaagtagcaaagaaaacagctgataagttaggtatagaaaatatccagattaatataacacaagatgaatatataaaatcattaccgaatgtaatttattctttggatgaccctatagcagacccttcagaagtaggtctttatttcttaattaaagaggcaggtaaacatgttaaagtagcattgtctggagaaggagcagatgaattatttggaggatataatatatataaagagtatagtactatgaaatcagttgtcaattcacctacttatattaaaagtatattaggaagagtttcagaacttatgccaaacataaaaggaagaaattatctttatagagctacaacaccattagaaaaaagatatataggaaatgcaaaagtttttgaaaacagcgaagtaaaaagattcttttttaagtataaggaaaagaatatatatgaatacctgttgtctaatttgtatagagatgcacaaaaaaataattacgattatataagtaaaatgcaacatatagatgtgaatacatggcttcaaggcgatatacttcaaaaaattagcaaactttctacagctgagcaggttgaacttagagtaccatttttatataaagatgtatttgatgtagcaaaaaatttaagaatggagcaaaaaataaataagaataatacaaaagttttacttagagaggcgtttagagaaatagtcccagaatatgttgttcaaaggaaaaaattaggatttccaactccaataagagtttggttaaaagattctctaggggatattgtaaaggaaactatttataattcaaatgtagatgaatttatagataaaaaatatgcaataaaacttttagatacgcatcttaaaggtcatagagataattcgagaaaaatatggactatatttacattttgtctatggcatcaattatttattgagcataaaaatgtcgagtattaatacttttttcaatattaatcagagggcaaaagcatgcaatgttttcaccctcttgattattatggaataggataagtagaattttgattgattagtttactatctcaataaaattattggcaaatattttgacaagattactttcaacagctaaatttaagttttgtccatcatcatatccagcggaaatcaatcctagtaagtttccaaacatatctaaaagagctcctcctgaactaccactagagattggagctgtaaattgtatcatttgaaccgtttcaaaatcacgaaaagctgagataattccatctgaaactgtattaaaaagacctaaagggcttccaattgcaactattttttgacctctcacaggttttttactgactttaacaggtattggtttgcattttctatcaacctttatcacagctaaatcataatctgaatggtattttataatttggtaagatgtataaactttatcatcattttcaaatctaactaaaaatgaatacccatcattgactacatgaagattcgtaagtatataaccttcattatttattactactccagaaccactcttaaacggtttattttcgttattgcacacaacaatcataacaacagaagctgataactttgcaaggtcttcataagaaagttctacttcctcatcttgtgcaatttttttagatgttagatttgtgttattaagtgtatttttagagttaggtttattcgtagtaggagaagtcttattggtattttcactgtaatttatatttgtaatatgcctttcaaaaggtatttctaatatatttggagttttcctagaaagttcaaatagagtagaaaattttgaacattcaggatataaatcaagaatatctttatttggatttatatataaaatatcacacccaagttgtgataaaaaatataagaaaaaaagttcttgccttttaatatttccaaagtatactatctttggtgaaatagtagtcttcaccttgttataaaataatttaggtagaaaatagtccatccaacacaaaagtttaactgcaaagtttttgatgatagaggatgtacaatttggcatacttgtggaaaataaatctaaagtatttttaaatgcaatctttttagtccaatttaaagtgtcattttctattttacatggaaagtcgatattatataaatcccaactgttaaacttagaactatcataaatattaaaaattttaagcatcttatctgtttgttctttgtcaaaatttatttttagattgtttaatctaatatagggaattgtaggattattaaaaaaataagtatctatatttttaactttttctatgtatttatcaattgaatcatcaacacctatatatcttgtaaagtggacttctttaatatatgaagaactcttatttttataggtagtatcagatataaattcaattagaggttcagttgacttttttattgaaatctttaatggtttaatagtacaaatcatattttttctcctataataagatgatataatctattataaaacaacttaaaacaatatagtacaataattttgtagtttcaaaataaaatatgtacttgtttatataaatgatatataattacatattaaacatagcttttatacatttaataaagtatgtaaaatctatgtaaaaagtaagaaatataaacatttttttaattatattttaaaaatatcaagcaagttttcttcacaaatgaataaaaaatgttataatatgattaaagaaaaagataaataattagcaagatttgtttagctaaaattaacaagggagcgataaattatgggtataacattatcaaaaggccaaaaggttgatttaactaaaggaaatccaggtcttaaaaatattttagtaggtttaggatgggatactaacaagtatgatggtggatttgactttgatttagatacagcagcatttttaacaggagcaagtggaagtgttactaatgatggagattttgtattttacaacaatttaaaacatacatctggagcagttgagcatctaggagataacagaactggcgaaggtgatggagatgatgaacaaatagttgttgatttatctaagattcctggagaaataagcaagatttcttttactgttacaattcatgatgcgacagaaagaagacaaaattttggacaagtaagtaattcttatataagaatagtagataaagacacaaatgaagagttaataaagtatgaattaggagaagattttagtatagaaacagctatagtagtagctgaaatatataagcacaatggagaatggaagtttaatgcactaggttctggttttgaaggtggtcttgctgcattatgtggaaactttggaataaacttataatttcaactataacaataaactaaagggggatattttccatggctatagtattaaaaaaaggacaaaaaatcgatttaactaagggaaatccaggtcttaaaaatataaaacttggactaggatgggatacaaattcatttgatagtggctatgattatgatttagatgtaagtgttttcatggttggagaatctcaaagagttgaaaaagatgaagattttatattctacaataacttaagacatccatctggagcagttgaacacttaggtgataatagaactggtgaaggtgatggagatgatgaggaaatattagtgaatttagagacaatgccaaagcatatacaaaagatagctgtaacagttacaatatatgaggctgctgaaagaagacaaaattttggacaagtaagcaactcatatataagagtattaaattctgaaaatgatgaagaaatattaagatatgacttaggtgaagaatttagtatagaaactgcaattacagtatgtgagatatataagtataatggagaatggaagtttagtgcagttggagcaggatttgaaggtggcttagaagcactttgtagaaactatggcttaaatgtttaatttaagcaatataatatattaaatataaataacctatacaaataatgtataggttatattatataaaattttgtggaggtttagtatgtcgattaatttatcaaaaggtgataaaatagatttaaaaaaatctaacccaggactgagtaacatacttgtaggtctaggatgggaccctgtgcaacaatctggaggaggtttttttaaatcgttatttggtggaggacaagctgatatagattgtgatgcatctgtatttatgcttaatcaagaaggtaaattaagtggaataaaagatttaatttattttggaaatctaaaaagtgcctgtaaatcagttttgcatacaggagacaatctaactggtgagggtacaggtgatgatgaacaaatcctagttaatttggataaagttccatcaaatattcataaattattgtttgtagtaaatatatacaattgtgtagatagaaaacaacactttggaatgatagaaaatgcctatataagagttgaagaccaaggtaataagaaagagatagcaaaatacaatctatctgataattattctgaaaaaactactcttatagtaggagctatatatagaaaagatggaagttggcaatttaaagcaattggtgaaggaacaaaagatgcgggtcttaaagaagtaatgcaaaatttagacaggattgagtgtgcatatggaatttaataatgatatcaaatattataatgtagataaagaagaagttacaaaagacttatctgttaatcctgaaaaaggtttatcagaatcagaagtcaagactagaagagaaaaatatggtttgaatgaatttactccaaaagaagagggtagtttttgggatgatttaaaagaaagtttaagtgaaccaatgatagttatcttgattattgcagcagtagtaagtgcagtaattggggaaactcatgatgcaatagggattgtaggtgctatagcaataggtatagcaataggtatgattacagaaggtcgttctaagaaagcagcagaggctctttctaagttgactgaaaacatagaagtaaaagtattgagagatggggaagtacatcaaatttctaagagtgaattggtaccaggtgatatagtatatattgaaactggtgacatggtacctgctgatggtagacttatagaaagtataaaccttaaaattagagaagatatgttaacaggagaatctgatgacgtatctaaaaagtgtgatgtagtagtttctatggaagagatagaatctaaaggagcagtagtagtacaggagccaatacctgcaaaacagataaatatggtgtttggtggtacacttgtagcttatggtagaggagctctagttgtaacttcaattggagataatagtgaaatgggtaaaattgctcaaaacttatcagaaacagatgagcaaactccacttcagataaaacttggaaatttaggtggtttgatagccaaagtttctagtgcagtagcaggattactatttatatttatggttttccaaatgataagtaagaatgtattaaatgtagatatgtctggaatattaccgtttttagaatcaatagacccagttaaaacagcatttacagtatgtgttgcgttgatagttgcagcagtgccagaaggtcttccaactatgataaatatgacacttgcaataacaatgcaaaaaatggctaaaataaatgcattggttaccaaaaaagaagcttgtgaaacgataggttctgtttctgtaatatgttcagataaaactggtacattaactgaaaatagaatgactgtagaagttgcatatgttgatggcagatatattgaaagttcagaagaggaaataaatagttattttgaagaaaactgtatgataaactctacagctgatgtagagcacaatgatggtgatattaagtatttaggaagtgctactgaatgtgcattgcttttatattacaaaaacgtagattatagacaagttagaaaaaattctaatatagtagctcaaaatccttttacttcagattcaaagagaatgacttctgttataggtcaagataatcatcatgtactattatcaaaaggagcaccagaagtcttacttgaattatgttcacatattcaaagaggaaaagacatagttccattaactgaaaatataaaacatgagattttagaagaaataaagaaattgcaaataaaatcaatgagaactttagggtttgcatataaagaaatctcacaagctgaagaagaagcagcagtaactgctgaaagtgatgctatgaatgtaagtgcaatggaaaataatttagtatttagtggttttgttggtataagagacccacttagaaaagatgttatagagtctgtaaatacagcaaataaagctggtgtttctgtaaaaatgcttacaggagataatataaatacggcaagagctataggtgaagagttaggcctattaaaaaataatatgagagtggttgaagcttcatatatagatactttagatgatgaagaattaaaacaagagatacaaagtatttcaatcgtggcaagaagtaaaccagatagtaaaatgagaatagtttcagctctgcaaaagagcggggatgttgttgcagtaacaggtgatggtataaatgatgctccagcactttcaaaagcagatgttggtatagcaatgggtatatctggtacagaggtatctaaaaacgcagcagacataattttaactgatgatagttttagtaccattgtaaaaggtattaaatggggtagaggaatttatgataacttccaaagattcgttcaattccaattaactgtaaatgtaattgcatttttagtggctataatatctcaagttatgggacaagagatgccatttactacaatacaattattatgggtaaacataattatggatggaccaccagcactagcattaggtttagagccagttagagaccatgtgttaaatagaaaacctgttgatagaaaagccaatataatttctaagtcaatggtgtatacaatagtattaaatgcattttatataacagcaatactaatgttacaatctacatttaatttcttaggagttgatgaagctcataagggaacagtaatgtttgcgttatttgcttttagcgcactgtttaatgcatttaactgtagagagtttaatgcagatagtatcttccctaattttacacataacaaattagcactacaaataatagtgttgacaggaattgcacaagtaatatttactcagctattccaagatttctttaactctgtagcaatggattttatgacatgggtaaaagttttatgtgtagcagcaagtgtaattgtggttaatgaagttgtaaaatgtataataagactggtaaaaccaaaaaagactgcttaaaacaaattttttagaagaaaacagactgactcaaaatatgaattttgggtcagttctgaataaacatttaaattgggaggatagttatgggtgactcaaaggtatttgaaaaaatattctccagccaatcagatagaggaaattacactccttcaaagggatatctaagttattttatttcgtatattggtttagaagatgaagttttgtacaatctcgagatatttaagacaaaacaaaatattgatagcaaaaaagatattgctttatttactgatgttatagcaaatcctagtgattttgatattataaattattttaaaagtggacttcaaaaatatagaactagcatggaagatgtagatataaatattttgggatttgaagagattgattataaaataaagcaagcaatggatagagtgttaaaagaagaggaaaaagaatttactaatgatagagttaaacaaaattttatagtgaaaataatggcatggataaaaatttatatcggtgctttagatataaataaaaatgaagctccaaaagtaatattttatggagatataaaaaaacatgaagtttatttactcttaatattatacttggcaggttttgatgttttatatcttaatccaaattcaaagagtaatatagatattttaaaatcagaaagatacaatatagagtttgaagaagccaacataatagaagaaaaaatttcttttgaagaaagggttattttaggggaaaaaatagataaaagttctgtaaaaaaagcttttactgttggggcagaagcatcaaagcgtataagtgaggaattgttaaatgatgcaggatttataaaaccttggcaactccaagatagaaaaataaaaaatctacttctaagttcaactgttgatgaaatatcaatatactggaatcaaccacttaaattaagaccaggatttaagtttaatgatgctattgtagaagctccaaattttctttctaagattaatggaatatataatgataagaatgaatatattaagtttttagatttattaagagattcggaaagttcaacatttattgaatttaatggagatgtagatagattttcaaaagcttttacgagagaagcttttagtttatcctttttattggattcaaaaggtgtaatagataaaaactctgttttaaataataaagattattccatatcaacactagcacttaatcaacaaattatgattttagagaaagtggaagagttgttagaaggaagtatgtttttgaatggtttaagtggagaagacaagataaaaggtctatttacagtacttcacatggataagaaatttgttcatatgatgaacaatttcgattactcacttataaacccaaaattgattatatacatgtacaagagtattgtatttgataaagaaatagtttttcttatgcttttacttagtaagattggatttgatattatcatattatgtccaggaggagaaaacaatatagagaatgttataaataaccaattgattgatatacacagattggataaaatggtatatgaccttaaattaaattcgcttgaaaatgatatacctttacttaaaaaaatttttggaaagaggagacgattttagatggggataaatataaatagtttttcaaaagataagaactctgtagaggttactgagaatttgcctacagcagttcaagaagaaaacttcgatataatggaatatacaaataataaaaaaaatgaactgagaaagtctaaggaagttgaggcattgacatcccttatagaagtagaaaatccagatacgattttacagtttggtaggaaagcatctgaaggagtagcaagagtttctgatagccttttaaatacaataaaattaaatagaaatgaagaaaattctaaaatgctggttcatttaactaaaataatggataagtttgatttagacgattttcaagaaactaaggaaccaaatttcgttcaaaaacttttcaaaaaagctaataatgccattgaaatgatgtttcaaaagtatgaaacattgggaggagaagttgagaaaattcaaattgagcttgagcaatacgaaagagatatagcactttctaataagcaaataggtgctatgttaaatgaaaactttgagttttataatgaacttcaaaaatatattgttgctggagaaatggcaatagaagaaatggataatgaaatactacctttctttaaacaaaaatcagagactagtggagaccaaatggatgttgtcaattatcaagaactattaaaagtttatgatatgttaaatcaaagagtctatgatttaagaatagcagaaaatatagctatccaaacaatacctatgcttagaggtatgcaacataataattatggtttaattagaaaaataaatagtgcatttgtcgtaactttaccagtatttaaacaatgtttatctcaagctatattacttaaaaagcaagaattacaagcaaaatctctaaaagcacttgatgacaaaactaatgaattattgcttagaaatgcacaaaatgtaagtactcaaagtgcacaaatagctagaatggctggaacaagttctgttcaaatagaaacattggaaaaaatgtacaatactatcaagtctggtatagatgaaactatgagaatagaagaaaacaatagagctttaattaaggataatacaaagagattggaagaattaaatacgactataatttataataagtagtattatattaagggctaatttgtataaagttggccctttctatgtatatgaggaggctagacattgaaatatttcgattatatctgcaaagatgatttggagagaatttttttgaaggagccagaagactttagtgctaagactgaaaaagatgtgttgaaatatgcactgggcgcttttttatacgttccagctactcaatataatatgatttataagagtattataggggatgttaagggagttagaccattagctatttgtttagaagatgctgttggagtaaatggagagttagaggctatagaaaatcttagattaattttaaaaaatattagcaatgaaagtataactaataaagatggaataccactaatttttgtaagaataaaagatgtggagcaactgttgagaattaaagagattataattaaaaatagtcattctataacaggaatattaattcctaaagcaaattcggagttgattgaaaattgtatagaagctttatattctatgaatcttcaagatatgtatgttattccaataatagagacaagagaatttatatataatgaaaaaaaagaacttagttttactaatttgtacaatgctattttaagacataagtcaagaatattaagcattagagtaggcataactgatatattagggatgtatggtataaggagagataaaaacttctctatatataataatttgatttgttcttcatttatattagatataatcacatatcttcaaagaccagagttagatatacctataagtggtggagtatcagaattttttgatatgacaaataaggatataagaaataagtatatagaagaaatattattggataaatatcatggattaattggaaagaccgtaattcatccaatgcaaattcaaattgtacaagcgctatctacagtatcatatgaagattttactgatgctttggatatactggatagtacagacagtaagtatggtgtgagcaagggtgtattaggagagagaatgaatgaaacaaatccacattttttatgggctaaaaaaacattgattctatctaaaatatatggtgtattaaataaaggagtagactatgaagaattgcttaaattttaattgtgagattgacattattgataatccattgaatttagaactaaatgattttttagacgtaggagtaagaaataatagcaaaagacgttttttgtttatctcaaagaaactcggtaaacatttagcatgtaagccaagtgagatggataatttgggaaaattaatggctacaatttataatgaaaaaaataaggaagaatcaaatggtactgttatagcttttgctgaaactggtacagctgttgggcatagtttttttgattacttatgtggagattatgaatttattcatactactagagagcagtttgacgagttagaaaatctggaatttttagaggaacattcccatgcaacagaccagaatttatactttggtatgcttaacaactttaaatttggagatgagataatattggttgatgatgagattaccacagccaatacatgcatgaatataattaggaaaattcaaagcatttatcctaaaaagaaatacactatatgctcaatactcaattgggtaagtgatgaaaatttaagtaaagttactcgtttagaaagagagctaaattgtaagatagattttgtatacttatttaaaggaaactttaaattttatatagatgaagatattatttcaaattacaacgataattatagtattactaaattagagactatttcaagtgataaagtaaatttagtagtaaatcatatttatgttgatttagaagattatattggaaataagaaatatgtaaaatatacaggaagatttggaattaatagaagagaacaatttagattaaaagaaatcgttaagagagaaagtaaaaaaataactatggccagtaaagaatctttaaaaaatgaaaaagaaaagattctatttttaggtactgaagaatttatgtatatacctatgctgtttgcaaaagaaaaagaaaatcaatatgatatatactatcattcaacaacaagaagtccaattattaatattgataagaagcattatcctattaaaagtaaatttatgctaaagagtttttataatatagatattcaaaattatatttacaatatagataaacataatttttctaagtgttatttatttgtagagctgaataaaagtgaaaattcttatctagaatttattgatataattaaaaaaacaagtataaaagaattaactatagtatgttgtagctaaagtgttttaacaggataaaatatatcacgattttaagataggagttgagtcatatgagagattttagcacgtattctaaagatgatgttatttttttattaaaagatatatcaaatttaattgaagaagaaggaaataaagaaagagaattaaaaatacaaaatggtagacattattcagaaatgataccaatagagtatgaagttagtgaagattatctgaatttatatcatgagaaactaagagaaaataaagataagcttgcattttctataggagttatgtgtgaaaaaataattaaaaaaaatggaaatgatgtagtactagtttcacttgctagagcaggaacacctattggtattttggcaaaaagatatataagaagcaagtataatgtaagtttacctcactatacaatctctataataagagataagggaatagatatgaatgcaattgaatatatagtaaagaatcatccgagctcaaaaattcaatttttagatggatggactggtaagggaactatatcaaaagaacttgaaaaagcatgtgatgaacttaatgttaaatttaaaaaacattttgactcaacacttgctgtattagctgaccctgctggatattcaggactttatggaattagagaagatttcttaataccaagtgcatgtttaaattcaaccgtttctggtttagtaagtagaactgtactaagagaggatttaattggtaaaaatgactttcatggagctaagttttatagacatttaaaagataaagatgaatctatgaactatatcgaaactatagaagaatgttttaaaaatcaatttaagaatatatctgatgaagttgaaaactgggaaagtgacattataacaagagatggatactttgatgttttaaatataaaagaaaagtataacataacagatattaactttatcaaaccaggtgtaggggaaacgacaagggttttacttagaagagttccgtataagattcttgttaaagacttaaatgataaatctttagaccatatattcatattagctaaggagaaaaatgttgaagttgaacaaatggatttaaaagcctataaatgttgtggaataataaaaaatatgaaagatatttaggaaatatattagacaggagaatattgaatgattgttttttcagatttagacaggagtatcatttactccaataaatttttaaatgctgatagtaaatatgctaatatagaaatttatagggaaaaagaaatatcttatatatctttagatactataaatttaataaagcaaatacaatattatggtatgtttatacctacaactactagaacagtggagcaatttaagcgtatagaatttaataaatatgggatttattttccttggagtataacttcaaatggaggagttatacttaaagataatgaaatattgaaatcatggagtgaaaaaatagataaactaaaacctgattatgagcccattgaaagtatgattcataaatttaaagactatttgaatgtagatggaataactaattttaaagttgcagaagatacatttttttatatagttgttgatttctcaagatttaatttggattcaatcaaagaatatacaaatatattggaatcaaaaaattggaagttttatgtgagtggcagaaaaatatattttataccaaaagaaatttcaaaagaaaatgctataaaatacttgactaaagaattaggaatagaatatttttatgcagttggagattctattatggactatggtatgcttaatatctcaaataaatcctatgtattgaagcatggtgatataaataaaaatgaaatagaaaattcatttatatcaagttctttcaaaggaatgagtggaactgaagagatattatctaacattttagacgagaactgcctacttaatatataatgactgatatataaataataaactagaaaaatctgaaataaattatagtaaagtttatcatactaatttatttcagatttttatcaatttatatttaagtaagaactcaatatgttaaaatgaaggtggagtcattgcccagactgagatacatacctcatcatcataattttcatacacatgtggtatagtactgttaaaataaaaactatctccttcctccaatagatattccttatttccaagtgttatcttcattttaccttttattatatagccacattcttctccttcgtgtgtcacaaattcactgtttttttgtgtatgaccatctagcgtaacaagtataaattctatttttttcccagataaattaggaacaagaagttcataaaattttgtagaatcattagttactattttttttcgattatttttctttactactatatcagagtcctctcttccaatctcttcaaaaaaataacctatatttatatcaagagcttttgatattttccacattgctacaatagatggaacaaccatattacgctcaatttgacttattaagcctgtacttaaatctgaattttttgctaaagtagagatacttatatttttagattttctaagagatctaattttgcttccgacatctatattcattagatacaaaccccctcagacatgattataacatataatttataaagattaataaaataaaaaaaagttttataatgcatgtattttttatgttatattgaattttctgaaaagatgcattataatagtattaatattcaatatattgaatattgataatgatattttaatttaatgaaatggaggtaattaagatgaagagttttgtaagtcctgataatatttgggtattatgggcagttgtaactggatgggcagcatttagtatttacttggaacaaaagtacaattgggcatcaaaagtgtcgggagcaataatagctcttgtaggagcaatgttattatcaaatctaaatattataccagtagagtctgttgtatatgaccaagtatggggatatgttgttcctttagccatagctttattgttatatcaatgtaatattaaaaagatatggaaagaaagtggaagattgctcattatatttcttgtaggttctgtaggaactgtacttggagctatgattggatttttagcattaaaaaatgtagtaccagatttaaatattgttgcagctatgatgacaggttcttatataggtggaaatgtaaactttgctgctatgtcaggggcgtttgatgcgccaggagaattagtatcagcaacagttgtagcagataatcttttaatggcattatatttctttgtcttaatagctataccatcaattggattttttagaaaacattttaaacatccacatgtagatgaaatggaaagtataggtataactgaaggagaaacagtagcagcaaattattggggaagaaaagaaatatctttaaaagatatagcaatagccattggtagcgcctttataattgtcgcagtatctgtagaactatcaacttggtttaaagctataataccattatcaaatccttttttagcaatgttaaatactttatttggaaatcaatatctaataataactactttgactatgttgtttgccacatttatgcctaatttctttggtgatataaaaggagcacaggaattgggtacatttttaatatatatattctttgttgtagtaggtgttcctgcttcaataacattaataattcaaaaatcaccattactacttttatactgcggaataatggtactaataaacatgctagttacatttatagttgcaaaaatatttaagtttagtttagaagaagctattcttgcatctaatgcaaatattggtggtcctacaacagcagcagctatggcaatatcaaaaggatggtctaagctagtagggccaatacttatagttggaacatttggatacatagttggtaattattttggtcttttagtaggaaatattttgatataattttacgtgaaaagaagttgttttttagaaagatttttatttaattggaggttgttatgattttcgatggacattcagatacttgggcagatgtaacaataagaaggcttaacggggaaaaagatgtatttagaagaatccatcttgataattttaaaagagcaaatatagaaggagctatttttgtaatatggatagacccaccatatgataaagagcctgaaaaaagagttaaacaaattataagctctataaaagatgaaattgaagatatgaaagatgttgtaaacatagtaaaaaaatattcagatatagataaaggtataagtgaaaacaaaataaatattttaattggtcttgaaggattaagccatattggaagaaatatagatttactagattatttttataaagaagttggtgcaagacatgcatcattaacttggaatgaacagaatgaacttgctacaggatgtttaggggatgaaaatcgtggtttaactgaaataggtaaaaaagcagtcaataaaatggaaaaattgggcatgatagtagatgtgtcacatttaaatgaaaaatcattttgggatttaatgtctgttgcaagtaagccagttatagcttctcattctaatgctaggagtttatgtgatgctaaaagaaatcttacagataatcaattaaaagaaatttcaaatacaggtggattagttggaataaatagttttagaggatttactaatagtaatcctaagaagcaagatttaatacatttggttgaccatatagactatatggtaaatcttataggtatagaacatgtatcttttggttttgattttagtgattacttagggaaagagactataggttcttttactggaaatgctagtgtgccaagtgtagatggtcttgaaagcacacatacagcacagaacatagtagtagagcttgaaaatagaggttataaaaagaaagatatagagttaatctctagtggtaatttttataggctctttaaagatatactaaaataatataataaagaacttaaatttataaaatagtatatttatacaataatatctacatatttaaattggcgttcataatttattaaattaaattttaatgttactagaagtttcaattctagtaacattttttatgttaaaaatagatatagatatatattgacaatgataattattattgataaactataaaagtgaaaatgataataattttcattttaattaataaaagatttttaaggagggagaatgaagaaaaggtatttagtcataggaataataattttgtcttatttttctttatttataggagctgaagatataaatataatgcatatatttgcaaaaaatcagcataagcttatgatatttatcatgagtagggtaccaagattaataagtatattgattgctggtgtaggaatgagcatagcaggtcttataatgcaacagataagtaagaataaatttgtatcacctacaacaggtgctacaatagatgcagctcaatttgggatagtaatatgtatgcttttagtaccaactgcctctatttttacaaagacaataatagcatttgtattttctcttgtagggacttttacgtttatgaaaataatagggaagttacaatttaaaaatataatctttgtaccattagtaggtataatgtttggaaatataataggttctatgacggattttatcgcgtataaatacgatttgagtcaaaatgttagttcttggatgcaaggtgacttttctatgatacttaaaggaaattatgagatattatatatcacaataccccttataatattagcatatatttatgcaaataaatttactgttgttggtatgggtatggattttgcgacaaacttaggtcttagttacaaaagaattgtcaatataggtctgataatagtagcacttgttacagtatgtgtagtcgttacagctggtaatatcccttttataggtctaatagttcccaatatcgtatccttgtatatgggtgataatataagagcaagcatatggtatactggtttacttggagcggtatttgtacttatatgtgatatttttggaagaattattatttatccatatgaaatatctataggacttacagttggagttataggaagtatactattcctttatttaatattaaggaggaatgtgaatgaagcttagtctcaatcaaaaaatttactttgtaagtatattactattcatatcaatagcactttttataatttatggaatagacatgaatcatttagaatatgcattatcacaaagaataccaaaaatatttgctatggtattaggtggaggatgtatagcatttactactgtagtgtttcaaacaattacaaacaatcaaatattaacaccaagtgtactaggtttagattcattgtatgtaatgattcaaactataatagtattcatatttggttcaagcagtagtctgattataaatgaaaattataattttattattaatgtagctatgatgattggagcttcattgttattatataagatgttatttgaaaaaaataaaaataatattttctttttaatcctagtaggtatgatatttggaaccttatttaaaagtgcaacaacatttattcaagtaatgatagacccgaatgaatttttagctttacaaactagtataatggcaagtttaaacaatataaacactaatgtattgttaatagcatttataataattattgccataataccttttatatatgatgaaataaagtatttagatgtattgtcgttaggtaaagaacaagcaattaatttaggtgtagattttgataaggcagttaaaaaaatgataatattaatagcaattttagtctcaatatcaacagcacttattggacctatgacatttttaggacttttacttgctaatataacaagagaaatttttaaaacatataagcatacatacttgatttcgggttctatgttgatagggatgattacattgataataggtcaattttttatacaacatgtatttaagtttgatacgactttaagtgtagtaataaattttataggaggaatttactttattcaattactattaaagggggcaaatagatgatagagataaaaaatatatttaaaagatataagaataaaaatgttgtagatgatgtctcttttagtatagaaaagggaaagataacatcttttataggaccaaatggagctggaaaaagtacagtactatcaatagttacaaggcttataggaggtgatggcggagaagtaataatagaaggaaaaagcttgactaattatagcaataaagaattagcaaaaaaaatagctattcttaaacaatctaacaatataactttaaagcttacaataagagaattagttggatttggaagatttccatatagtgaaggtaatctaactaaagaggatgaaaattatattgatgaagcaatagaatatatgaagttgactgatatacaacataagtatttagatgaattgagtggaggtcaaagacaaagagcttatatagcaatggtaatagctcaagatacagagtacatattacttgatgaaccactgaacaatttggatatgaaccattccgtacagatgatgaaggtacttagaagtctttgtgatgagttagataagactatagtattagtaatgcatgatataaattttgcatcatgttattcagataatatagttgcattaaaaaatggaaaagttgaaaaagtaggtcgtacagatgagatagtaaatgaaaaagttttagaagatatttatgagatgaattttaacattaagaatataaatggaaatcgaatctgtatttatttttaaaatattgtatatgaaaataagcttgctatatgattttttataaagtttttaaattaaaataaagattaataggagagaggaaaatattgatatgaataaaaaagcagcaatagtagcagcagtagctattataggattagtgacagtgtttgcattaggtggaagtaaaaagaatgaatcaaaaacatcagaaaattcaaataataccataaagataactcataacttgggagaaacagatgtaaaattaaatcctaaaaaagtagtagtatttgattattcggctttagatacaatggatgcattaggtgtagctgagaatttagtaggacttccaaaaacgagtttaccagcatctttagaaaaatataaggataagaagtatgcagatttaggaggtttaaaagaaccagatttagaaggtataaagtcggcaaatccagatttaattataataaatggaagacaagaagatttttatgaacaattgtcaaaaatagcaccaacaataagtacaagtaaagatgataagaagtacttagaatctgttaaaaataatatagacaaaatagcaaaaatatttggagtagaagaaaaagcaaatcaagaatttagtaaaattgaaaagaaaatagaaactttgaataaaaaagtaacagataaaaatttaaatgctttaactataatggtaaatgaaggtaatttaagtgtatttggtgaagaatcaagatttagtatattatacaatagttttggatttgaaaataaagataaaaatataaaagaatcaagtcatggacaaaatattacttttgaatatatagctaaacaaaatccagaagttatgttcgttatagatagaggaatagctactggtagtgatgtaaaagaaagctcaactgcaaaatctgttttgaacaatgatataataaaatctatggatgcatataagaatgataatataatatatttagattcaccaacatggtatgtaaatgatggtggtctaacatctttaaataaaatgatagatgatgcttcaaaagcggtaaattaataatccgatataatcaaaatgtattttttgtaaaatgattatcaaataaactaggagtttttaagaactcctagtttattttttgcataataaagatatagtttaaacaataatattatttataataagataaatctattcaaaatctaataaaatatgaagttatactagacaaaaagaataactcttaaatataattaagttatataataatatataattataatgatataattttaataggaggtttgtaattaaaaagtatataaattatattaatagtaataatctataagaacttatatattagaaaaaaatttttgtatatataaaggactctaaagatgaactatataaaacaaggtttatatattctaatagtatagaaaattttattgtaaacgcatgtatattattagaaaaaatagtttgaaggtattcaataaacataaaaaacaatataggggataaaggtgttttatgaagagatttttgaggagaattatcttagttttatttattttgttgatttttataagttttatttctattaaattaattcataatgttggagattatggaaaattgattaattatgttgggattgtttgtggagctagccaacgtctaactaaactagagatgaatcatcaaccaaatgatgaattaatagaatatattgatgaaatcctacaggagttgattacagggcatggagattatggtttagtaatcactgattgtaatgaatacaatgaggacttacttttattagaaaaaaagtgggaagatttaaatattgaaattaaaaaagtaagaatgaaagaacagaataaccagttattaagtataagtgaagagtttttttctcttgcaaatgatacagtgtttaaaatagaaaacttttctaaagaaaaaagtaattacttaatgactttaataataattatatctattataggtatattagcatgtatcatattgattttacaatatagtaaaaaaatggttagactggaaaaattaaatgtagatttaaaaaatattgcatataaagatgaactaacaggagtaaatactatagaaaaatttaaattggatgcaaatcaaaatatttgtataaataaggataagaaatttgctgtattctatattgattttgaaaactttaaatacattaatgatatatttggatatgattatggtgacatgatactgaaaagatatgctaatcttatgatgaatgacatagggaaatatgaaatatttgcaagagaaattgcagatagatttgttgcgttaagatgctatgtagataaggaagatttagtagtaagacaacgagatgtagacaatgaactaattaatataacaaatgaaattaaaaataaacatagtattactgttgtcagtggaatttgttgcattgaagatgtaaatgaaaaattaagtatagatggtttaataaatagagcaaattttgcacaaaaaactgttaagaataaaccaggtactaattatgctttttataatgacagtattcgtaaaaaaatgattgaagaaaatactatcaagagtagaatacatgaagctattgaaaaaagagaatttatagtttatttacagcctaaagttaatttacatagtcaaaaaataaattgtgcagaagctttagttcgttggcttactccggataaaggtattatatctccagcaatatttattccagtacttgagaagaatttttttattgccttagtagataagtatgtttttgaggaggtttgtaaatggattagaaagaggttagatgaaaataaaccttttgttcagatatcagttaatgtttcaagaatacaattttataacactaaatttgtagaaacttattccaatatacaaaataaatacaggatacctaaaaatactatagaaattgaatttacagagagtgttgcttttgagaatcaaaaacatcttttggaaattatacatgatttgcatgaaaatggatttacttgttctttagatgattttggaaaaggttattcgtctttaagtgttttaaaagatttaccatttgatgttttaaagcttgactctatgtttttcaaggctagtttagataaagataaagagaaaatagtaataaaaaatattgtacatatgttaaaagagcttaatatcacaactgttgctgagggcattgaatgcaaggaacaagttgaatttcttagggatattgggtgtgatttagttcagggatttgtattttataaaccaatgccaatattagaatttgaagaaatattggataaagagtttgtttataatagctaaaatgtactttataaaatatgaactaattaagtaaaattattttgtactgaataaatttttactttatttacagaatagtgattatttacagaaaagggcgaaaagtgtattcctttaagtatgggatggatagcacaaataggggagaaaaaatattggccatataagaatgcataataatataaatatttgaaaggtcagcattatataaaaattaaaaagaaaataaataatttttctataaaaaagagactatgagaaaagttactcatagtctcctaaataatgtatttattttcttcctgcaacccattttaagccccaatgaaattcagtatccatttctctatgacctttgaagtatttaactactttttcaacactgaatgtctcatcatttacattttctatcaatgctattgaacacatattatagccatttttatgttcatcaagtttgacaactaagtctgaatcttgtttttgtttgattgttacaattccatcagcttcagaccagttagctacaccttcgtatataaaagcataaataagtattctttttatatcttttattttattaccatttattcttaaattttctccttgtgtattacttcctgttctgtcatctccatctaattgagcaaaaggtggattgtctaaactaccaaaagcatttcctaatgcttgaacagcaccttttacaccatttttcatctcaaataggcaacccaaatctaaatctatattactgcttcttaaagagccaaaaaaaccctttttttgtactttttgattccaatttaaattaactaagatttcacctaaatcgctattttccttttttgtaaggtttattttttgtcccttttttaattctatagccatagtaatcttcctccacaaacatagatttatttaaatggtagcacttaataagtcaatattcaacaagattagaataataatattaaaactatactaaatatactaaaaagtaggaatcacaatacctttgtatttttcttcaattaagcttcttgctttatctgatgtaagaacatcttgtagaactttaatcttttcactgtctttatcttcagttctaaatgctaaaagatttgcatactcgtcatttataggagctgtataaattccgtttttcttggcatcaagaccagcaggtacagcataagtagtatctataaatgcagcagtaacatctggaagagaagatggaatttgagcaatatctaactctttgaattgtattccctttggattttctattatgtccttaggactaactaatccatcccctttaggtaacgttaaaagtccaatactttcaaggtatctaaggttcttagagcaagaagatgggttattgcttattgcaattgtatctccttttttaaattcatcaacagattttatcttataagagtaaagtattgctgggcatacatatagttttttaccagccattattttgtaacctttggccttaacagcttcttttagataaggttcatgttgaaatagatttgcatcaatttcaccattatttaaagcttcgtttggaagtatgtaatcatcaaagtttttaacttctaaagtatatcctttttctttaataagtggttttaattcttctaataactctcctcctggaactaaagtagcaccaacaacaatttttttatcatctttagctttagaacatccaaccacagctaaagttagtactagacataataacaaacataataattttttgaatttcatataaattccctcctgaatataattgattagttaaaaataaaataccattctttatcacactgcaaaataaaaataagcctgagtttaaactcaggctttaaaagctaatttagactcatctttcagtataatactgcaggatttagcaccaatgtatataaaaatatactggttgctgggtttcatagggccagtcccttcaccactctggataagaagtatcaatttttaattatgttataaatattatcatgattttttacgtctgtaaacataattttataaatattttaaaatctttaatgtattttatttaacacctaaaattccagaaactagaatatcagtatcagcacctaagaaatagtcatttatttcaatagaatccagagtatttctcaaagcattttcttcatgccttataccaataagtttattttctacaaatgcaacatcacattttccaaaaaaatctccaaaaaattttatactagttattatgcctttatcaacatttaaattaaactcaacatttccaccagaatattttaattcatttgaaagagtatattttggtgaattaccaaaattccaatcccaagtttcgtattttgatttagtaagcttttctatttgttttatatcatgctcattcaaacaataattagtattatcagtatttgttttagaaagataatccattatagcatctttaaattctaatatgtccatttttgaatgtaaatgttcacttatattggttacacgagattttacagattttattccttttccttcaaattttataggtttaacctttaatgcttttgagaggtcatttatttcagatgaaaataaaagagtaccatgatgcattactttgtttttgtagttgtattgagcatttccagaaaatttcttgccatctataagaaggtcatttcttccagaaaattcggcattgacatctagtgttttaagtaaatctattatgggctgagtgaatcttctgaaatcactaaaattattattgttacaagctataaatgtaaaatttatatttcccaaatcatgaaatacagctccaccaccagactgtctcctaacgacaggtatagaatattcttttatatattctaaatttatttcagaaagtgtgttttggttttttccaacaattatagaaggttcattcctccataaaataaataagtcttcatcaaaattttttagaagatattcttccattgctaaattaaaataagggtttgttttttcattataaattaataacattaaagtagttcctccatagaattgataaaatttttattatgaatacaattaattttataattcgacaataatataaaaactcctttaaattagaaattttaaaaactaccttgcaaagtttaaataaataatatatactcaaaatatgtttaataaaagtgaatagaagggtagaggcgcaataatctatcagtactaataaggagttaagcacagagagttattaggaaaggagatattgccgaagttttataatcgatgctttaagattatattgctgggggtacatagaaaatatgtacaactgtcacaggtttatttgtggtgagctatcatttaaggaattatattatatttatttttactattgttgatatattgtaatgtttaagccttgagtgtttaccactcaaggcttttttagttttattgtaacataataccctgtacagttcacaaaattaaaaggagagggagatttatatgaggaacaaaaaaattaatattatttttctgacgacaatcatgttcataatgtcaacagtaatggtttttgcagaagaagatatagacactattgcactagctaatgcagaaaaatttgggattttaactttaataccaccattagttgctataatacttgcatttataactaaaaacgtaataatttctttacttataggtattctttctggtagttttataattaaagctagtggtattaatgtttttgcgacatttatacaggcatttttagatttagtagatagagctttagtatctttagcagacccttggaatgcagggataatactacaggttttggcaattggaggagtaataaatcttgttgctaaaatgggaggagctaaagctatagctgaagcacttgctaaaagagcaaagtcagcaaaagggacacagcttataacatggtttttggggcttttagtattctttgatgattatgccaattcactaatagtaggtcctatgatgagacctgttgcagataaaatgaaaatatcaagagaaaagctagcatttataatagatgccacagcagcaccagttgctggtttagctataatatctacatggataggtcttgaggttggtttaatacatgatgcttttgaaagtataagtatagatgtagatgcatttggtatatttttaaatacaataccatttagattttacaatatattaatattagctttcattgtaatatcagcattattattaaaagaatttggtccaatgagaaaagctgagataaaatctagaagtagaaaaattagtatagaccttgatgaaggcgtagaagagttggatgatttagctccaaaaaatggagtaaaattgagtgtatggaatgctataatcccaataggaacattgataatagttgcattagcatcattttattatagtggatatacatctataatgggaggagacgataaggctctgatacaactatttacaaattctccatattcttttgaagcaataaaagaagcatttagtgcatctgatgcatctagagcattatttcagtctgcacttgttgcaagtttagttgctattataatggctgtagtaaaaaagatttttacaatatcagaagcaattgatgtttggatagatggaatgaaaagtttagtaatcactggtgtaatattaatacttgcatggtcattaagttcagtaataaaagagttaggtacagctaagtttttaatacacctattatcaggttcactaccaccattcttattaccaagtttaatatttggtttaggagcaataatatcttttgctactggaacagcttatggaacaatgggtatacttatgccacttgcaattccattagcatactcattaaatcctgatatgtcttatgtaatagtaagtactagtgcagttttaacaggtgcaatatttggagaccattgttctccaatttcagatacaacaatactttcttcaatgggagctggctgtaatcatatagaccatgttaacactcaaatgccatatgctatatttacagcagtaatcactattgtatttgggtatataccagctggacttggattgccaatatatatagtattaccagtggcaatagctgctatatttgtaggtattcaaataattggtaagaaagttgatgaagcggaaatagaacttgtagaataaagatataaataagtttcaccttttattatcactattttgttagtttttagataattttaaaaagttattgaaaataatggcgaaatatagtaaaataaaagagtgataagcggatgtggcggaattggcagacgcactagacttaggatctagcgccattggcgtgggggttcgactcccttcatccgcactttacagtacttaattgtactgaaaaaaactggggttgctggctttcggagtgggctatcccgtttttatttttttgtatatataatagattggcactttagtataaggtgctttttttataggcaaaaacagtacatttatttctgttttattatcattcatctattagaatatactttatttaagaatgtgttaataagcagtgttcacattcttgataaaatgtggaataatatgcctaccaataagcatttggtgtataagtaagagtatttatatagttgattgtgaaatgagtacaacaattctgtacagtataattggcattataattgtagcattgaatttaaagtttgcacagtcgctgattggaaaatttacaaagtggatgtcaaacatataaattttagtttattggacagttcaaggaatcagaaattggaattttatagtattaatattttatagtattaatataatgtataaaattttatagcaatgtatttcataagtataaagtgactagaattttaagaaatatacaaattctataaaaactaaataatttcaagtatattttaaaaatcttatttttcacaagtttaaaattgtaaacgatttcatcaagtctatgaatatacttttaacatgttatagtaaatctcaatataaatttacatttggttctttgtgtgttattttaataataaattaagtgaaaatgttattttacattaatatataatatctttgcataagagtgaataatataaaagagaaagaattgataataaaaacttaacaaaaaaattaatacataaaaaaaaataaatataatgtgttgacatttaattgaaatattcatacaataaaattgaaaataaatatttccaaatgagattagcgagagagtcctttatacgaaaaggcgccgaagaagaaatttaagaaatgccaatttttagagaagctttcaggcaaaaatatcgctaattgatgggactctggagagacttaagttaagatactataagtcaccgaagaagcaaaataatattaaattattaaatctttcaggtatacaaacagggatatataggctaggattattttccatgctgatatatcttttttttatgaaaaagtacaggaaataatatcaaagttacttaaatacagtaggtctaattttctagggagggttatatatgaatgaattgaaaagagtatctttgtacaatatacacaaagagcttggagcaaaacttgttgaatttgctggctgggaaatgcctttagaatatgagggtataaataaagagcatgagaaggttagaaaaagtgcaggtatatttgatgtatctcatatgggagaggtacagataaagggagcagagtcagaaaaatttatacaaaacctagttacaaatgatataagcacattaaagataaatgacattatatatacacctatgtgttatgaaaatggtggagtagttgatgatttattaatatataaatttggtgaagaagattatttattagtaataaatgcaggtaatatagataaagatgtagcatggataataaaacaaagtgaaggatacaatgtagatataaaaaatatatctagtgaagtgagtcaattagcaattcaaggacctaaagcagaagaaattcttcaaaaaatcacagatatagacttaaactcaataaaattttataagtcaattccatcaacaaaagtatgtggttgtccttgtttagtttcaagaacaggatatactggggaagatgggtttgagatatactgtaaaaataaatatgtagaaataatttggaatgaagttctaaaggttggaggagaagatatatgtccagctggtctaggttgtagggatactttgagatttgaagcagctctacctctatatggtcatgaaataaatgaacacatatctccaattgaaggtggtttatctatatttgtgaaaacaaataaagaatcatttattggtaaatcaattttatcaaaagaaaaagaaagtggagctaaaagaaagttagtaggatttgaaatgcaaggtaaaggaatgcctagaaatggatatgatataaggattggtgataaaacagttggatttgtaacaacaggatgtgcatctccaacgacaggaaaaattttaggtatgggaattatagattctgaatatgcaaaagtaggaaatgaaataggtatagcaatcagaaaaaaagttgttcctgctgtgatagttaagaaacctttttataaaaaacaatataaaaaagataatattatattaaacaaagaaaataaattttcatatatacctgctacaagtgaagataaatcaaaaatgttaaaagtagttggattaaattcggttgatgaattattttcagatataccagaagaagtaaaattaaaaagagatttaaatttggaaattggaaaatctgaattagaggtaagcaaaatagtaaaaagattgtcagaagaaaacttaagtttagaagacttgacttgttttcttggtgctggtgcatatgaccattatataccatcaattataaaacatataacttcaagatctgaattttatacagcatacactccatatcaagctgaaataagtcagggaactttacaagtagtttttgaatttcaatctatgattgcagaaattacaggtatggaaattgcaaatgcatcaatgtatgatggagcaactgctgcaatagaagcatgtataatggcaatgaatcagactagaaaaagtaaaatagtagtgtcaaaaactattcatcatgaaactttgtcagtattaagaacttacttacaatataaagattgtgagatagtagaaattgacttttgtaatgaatatgggactacagatatagaaaaattaaaagcttctgtagacaaggatacagcatgtgttcttatacaaactcctaatttctttggaattattgaagaaatggaagaaatagaaaagataactcatgaaaataaggctatgttaattatgagtgtagacccaatatcattaggagttttaaaaacaccaggtgagataggtgcagatattgttgttggagaagctcaatcacttggaaaccctcttaattttggaggtccttatgtaggatttttagctagcaaatctaaatatactagaaaaatgccaggaagaatagttgggcaaagtttagatgtagaaggtaaaattgcatatgtattaactttacaaactagagaacagcatgtaagaagagaaaaagcaacttctaatatatgttcaaatcaagctttaaatgctcttgtagcttcaatatatatggctactatgggtaaagaaggatttaaagaggttggtatgcagtctatgaaaaaagcacattatacttacaataagcttgtacaaactggaaaatataagccaatatttaaaggtaagtttttcaaagaatttgctgtacaaggaaatcttaatatagaaactataaatgataagctcttagaagaaaatatattaggtggttataatttagaatacaattatccagaattaaaaaattcaactttgctttgtgtgactgagaaaagaagcaaagaggaaatagataagttagttggaataatggagggattataatgaaagaatacaatagtttgttgatagatatatctaaaaaaggtaggaaagcatactcacttccaaagttagatatagatgatataaaaatagaagatatgattgaccaagatatggcaagacaaagtgagttgaatttgccagaagttggtgaattagaattagttagacattatacattattatcaaataaaaactttggagttgatacaggtttttatcctttgggttcttgtactatgaaatataatcctaaaataaatgaagatatggcagcacttccaaactttactggaatgcatccataccaatcttcggatacagctcaaggttctctttctttgatgtatgatttatcaagaagacttgcagaaattacaggtatggatgaagttacactacagccttcagcaggttctcatggtgagtttacagggcttatgattataaaagcatatcatgaaaatagaggtgaccataagagaactaaagtgataattccagattctgcacatggaacaaatccagcaagtgcagctatggcaaactttgatgtgattcaaatagcatctgataaaaatggagctgtagacataaatgcattaaaagaggttttgaatgatgaagtagcagctcttatgcttactaatccaagtactcttggtttatttgaaaaaaatataaaagaaatagctactcttgtacatgaagcaggaggacttttgtactatgatggtgcaaacatgaatgctattatggggataacaagacctggagatatggggtttgatgtggttcatcttaatcttcataagactttttcaactcctcatggaggtggaggtccaggagctggtcctgttggagttaaaaaagaattagtaccttttttaccaataccattaattgaaagaaaagaagataagtatgtactaaattatgatagagaaaaatctattgggaaaattaaaaatttctatggtaattttggagttcttgtaagagcttacacatatatactaactatgggaagggatggacttaaagaggctagtgaaatggcagttttaaatgctaattatataaaggaaagtataaaagatgattatattttgccaatagataccttgtgtaagcatgagtttgtattaggtggattgccaagaggagaggccaatataaaaactatcgatattgcaaaaagactactagattatggataccatcctccaacaatgtactttcctcttattataaatgaggcacttatgatagaacctacagaaagtgagagtatagagacattagatagttttatagaagctatgaaaagtgttgctaaagaggcaaaggaagaaccagaactattgaaaactgctccacataatactttggtcaaaagagtagatgatgcaagggcagtaaagaaacctatactaacatggtcacaaagataaataattaaaaagtagagatttaaagtataaagagaattaaatttgtaagaaaaagctatctaacttaatccagtttagatagcttttttgtatattagtatgtatggtattttctatataaagttttaaattatattagtgcttatatagaatattgatatgatgattatgtatagatattaataagaattgttgaatttatcttgccttaactttatttactcttttatcttaagaaaaacttaactaaaatatagcgaaattcataaaaatttaggaaatcttaagaattataatatttaaatctttagatttatattttattatataaactatagaataataaaatataaaaattgagaattttataatatatttgtagatttgagtataaaaaagtgctaagttgaaaggagtaaaatatggataaggttaatttagaaaggtatagttgtgatataaatgttggtttaaataaaaatcaacttcaaagtagaatagatgataatttaattaatgcatttgataatggaaaaaccaaaacatataaacaaatttttaaagacaatatatttacactttttaatctcataaatattgttttagtctgtttattagtttcagttggttcttttaaaaataccttatttatatttattgctgtaattaatactattataggagtaatacaagagataagagctaaaagattattggacaatctatctgttatagtttcaaataaggtatctgtcataagagaaaaagagaaaaaagagattgatgtacaagaattagtattagatgatattatgattttaaaaacaggtaatcaaatttgtgcagattcaaaagttttaaatggaaaattagaggtaaatgagtctttggttacaggtgaatctgatattattataaaaaataaagacgattttttatattctggaagttttgtagtttctggagaagcttttgtaagagttgaaaatataggaaaagataactatgcaaataagatagttaatgatgcaaagatttctaaaaaacataattctcaacttagaaattcattaaattcaatattaaaaattgtaggtataataataattcctttaggaattatattgtttgcaaaacagcattttggaaatggagattctatagctacatctgtagtaggtacagtggcagctgtaaatggtatgataccagagggattaacattacttacgagcattgctctagctgtaggaactataaaacttgctagtcataaaactttagtgcaagaactgtactgtgtagagactcttgctagagttgatacactatgtcttgataagacaggtacaattacagaaggtaaaatgcaagttgatgatatagtaatgttggaagaagtggatattaatgaaataatggggaatatatgtaattctctcaaagatgataatgcaacactaaatgcaataagagataagtataatgttttagatacgtataaagctaagaatttaataccattttcttcagaaagaaaatacagtggggttacctttgaaaataaaggtacatatttattaggtgcatttgagtttatatttaaggaaaaaaataaaaaaattagaatagaagttgaaaaatattctaaaaaaggaaacagagtaatagttttagctcatagtgattcttatatggaagataataatattcctgaagatataaagccactagcttttatattgatattagataaaattagagatgaagctaaggaaactttagaatttttttacaatgaaggtgtagatataaaaattatatctggtgacaatcctataacagtaagtgaggtagctagaaaagcaggtcttaaaacggctagtaattttattgatgcaacaacacttaaaaatgataacgatatatacgaagcagttgataaatacagtgtttttggaagggtaagcccacaacagaaaaaacaaatgattttagcattaaaaaaacaaaatcatacagtagctatgactggagatggtgtaaatgatgtgctagcgcttaaagaagcagattgcagcattgccatggcatctggaagtgatgttactaagaatgtttctaatttagtcttattagattcaaactttgcatcaatgccaaaggttgttatggaaggacgaaaggtaattaataacattcaaagagcatcttctttgtttttagtaaagacaattttttcattcttcttgtcactattaacattattcttcttcagtagacagtatccatttgttcctatacaattatcactaattggagctgtaacagtgggtataccatcattcttcttagctcttgaagcaaacaaaagtagaatttcaggaaactttttactcaatatattaaaaaatgctttaccaggagcactatgtgtgacagtaaatgtaattattgtttacaatatagttgaatatttaggctatagttcaagtgtattttctacaatgtgtgctatattaactggtgtatgtggtcttttaatattaagacaacaatgtttgccatttaataaagaaagattatttttaattgtaagtatgactattgcatttgttattgggattctatttttaggtggattattctcatttgtagcattgagtagagaattaattctcataactatggcattagcaatattaatgccaattatgataaaagttatgttatttgtcttggatgagatattagagacaattgttccagatttaaattaattttaaaatgatataaataagagcagttttagttgaactgctctttttagatgtgtttaattttatataagaatatgtatttttattaatcagctatatatgagcaacagtagtcaacaacttcattaacctttaaatcaaaacttgaatcactaggaacattaaatttttgcccttctttataagttacaaactcattgcttccaggcagttttacatccatacttccagcaagcatctccattatttcttcttctctagtagaaaaagtatattctcctggcaacattaatcctaaagtttttctttctccattaggcagtattattactctgctacttaccttaccatcaaaataaacgtttgccttctttactgcagtaacattcttaaattcactcattagataaaacctccaaaattatttgtacatatatattatataaaaataatgtaaaaaatgctatatatttgcaaaaaaaaatttagtatttattaaaaaaattaataagaataaaaaagagatgaaattgcttaaattgataaaaaatataaaataaattgcaaagtaagcaagaaaagaataagttgaagagttatatattataaatattaaaaattttagtattaataaaaaagatattacattaatatgaaaatataggagattagaagtgtttgataattacagtttatatattataataaaataaattgttaattttaaaagaggtgaattttatggcacatatatgctttgaggatatttgttatttgttattaaaagaagcaatgaagttaaagttaataccacataataaaattgtattatttgaagatgatttatcaataggtaatatttttgatgtaaataactacgaattaagagaaaatatttttaagattagaaatgtttttgaaaataatccgaaactattattcaagccagatttgttagaagataggaaattatcaaaatgtagaaatataataatatggtgtgcaaataacccaaaagatttgtgtggagtatattatgtagtgagtaagtttcaagataaaaatataaagattgcattagtagatgaaaaaaagacagaagatgctctaattagatattcatttaccagtgaaatgtctccagaagattttccattctttttagataagacactagaaattggctttaatgaaaaactagaatttaaaaataaatgggatgtgttagttaaagaaaattctatttttagagcattagtaggtaacgaaattaaaagtgttgaagaaacttattttgataaatatatattaagaaatatcagtgacaaatggcaacctttaattgaagtggttgcaaactgtatgtttgaagatgaaatgcgtgtaaaagattggtttatactttggagattagagaagatggcaagtttaaaaatagtaaaaataaaaggaagtaaaggggatttttattctgataaggagataagaaaagtttaaaaattgaatttataataaattgtattaaataatgggtataactatgaagaaaaatatcttaacagtattaatattataattagcaataagtataatatttattctataatttgaaaatataataactaataccttacgaataagtgtgctaaataaaaaagaaatacttatttcagggatattagtatatattttaactacatttttacttaatagtattaaaatatggtgctatagagtaaataaactagaaaatttcaactttaatattacaatagtttattctaaatgccacttctttagatataggagatgaaaagcaagttttaattttttttaatcaatacatgttagatatatcattgtaaattaacataactttgaatataataatgttcagaaggcaatatttttgaggtatgaatccaataatatagtcttatgattgtagatatcaaaaaatataagttactaggaatacgttttgtagatttatatatgattaataactaaagctataaataaacaaaataaaaagagtatgtttcaacctatagcttttagatttaaaatatactcttttattaattatagttgcataaattaaccataatatataattaaaatttttattataattatatattaggttcttcaattagttttccacatacatatctatgaatgatatttctatcatcaccaacatagataaatctttcaagtctttcaagtatagaataattgtcatgatttaaatttgaatcatcaataatcaatgcatcaaaatcataaccttcttcaaagctaccaacttttccaaagaaacttccaccacttttggttgcaatataaaaagcctcagataaagataagaaattatacttcttaccagaattaacccaatataatttagataattgtattgcagataccattgctttaaatattgacaatgtatgtccaccgcttatatctgatccaagtgctaatctaatattattatcgattaattttctgataggcatagcaccactaccaacattaaagttagaagctggacagtgaactgccataacattgttttctctcattaaatctatttcatcctgagaacaatgaacacaatgagccattaaagtaggagtttgaccaaataaattatatctattatatgcatctccatagaatttagattcaggttctagacttctaacccattcaatctcatcataattttcagataagtgtgattgcataggaatattatattttaaacataaatctcctaaaccttttaaaagttcacttgtacagcttggtataaatctaggtgttattattggttttacaatagaatctgtatcactatacttatttataatttcttctgtatcagcaatagaatcctgagtgttttctaataaagtatcagggcaattcatattcatatttactttaccaacgtatgctccaagaccaacttctttgaatatatccataagtttcatagaggcttctttatgtactgttgcaaacactgctattcttgtagttccagatttccaaagttcttttacaaattttttatacatttttgttgcatattctatatctttataatttgactcttctggaaatgtataagtttcaagccatggcaaaagctctttatccatagccattccaagatttttaaattgagaggcatgggcatggaggtcattcataccaggtattataagcttatcagtgtaatctactacttttaggtttttgtattccttaggtatctctttaaatattccctttactttacctttttccagtataatataactattttcaaatactgtgaaagtttctgaagtttttgtaaaaattatatttccttttaatacttttaacatataggtctccttagttttaaatttgttttaatatatgtaggtaaaattttgttttacaaatcaaaattttaccacatgtattatatcaaatctaaactataaatactattagataatagcaaatattagtgaaatacagttgtttactattattatatataactgacacttaagtgacatttaagaaaaatataatgcttacttacataaaatggaatgttatttaaagagaactttgattatattttcaaaagcttttttatccatatcgtttaaaacaagaaaatatctattcatagttatttttatattagtatgtcctaatctttcagagatgatttttatattagttccagctagaagaagaattattagaatagataatatagtaagtatttacaaatatgtaggtgttcttaaattgataaattattccattttaattttatagtttgaattttatgatataataaaaatatataaattttgcagtgagcgatatttttgataaagtagggtttaacagttgcaatgtaagggattgagggtgtatgataaatgttatcaattgcactactcatggttcactgcaaatttgagagagttgtatgtgtgtaagtactgaaaatacttagtttattttggggttttatattaactatgtggtatgtaaatttaatttatctataatttaaaacggtgaattacatatgttttatattaactatgtggtatgtaaattaaagaggggtacttcgtacttttaccactcaaactagttttatattaactatgtggtatgtaaataggtcaagcatagattttgcaactggaagataagaagagttttatattaactatgtggtatgtaaatgttttagaacagaaaaaattgtataaattgtggaatggttttatattaactatgtggtatgtaaatttgtaaaatgtaaatagcatattaatttttctttcacgttttatattaactatgtggtatgtaaattggagcattatgtttttaggttacggagcaacatttagttttatattaactatgtggtatgtaaatggtgatagtggaagttttacttatacttggcgtgctggttttatattaactatgtggtatgtaaatttcagaatacttagctcctgcgcctatatcgtctgaatgttttatattaactatgtggtatgtaaataaagttttgcgcattgtatgtgtgcctagattatctgttttatattaactatgtggtatgtaaatatgtccccacatcaattttcctccgcatgaaaaaatcgttttatattaactatgtggtatgtaaattttagaaacaacagaataaacataatatataagcatagttttatattaactatgtggtatgtaaatttttacttttcctttctatgtgtccaattcggacacattgttttatattaactatgaggtatgtaaatcttatacttagttagaactatatatcgacacaaatatgctttatattaactacatgatatataaattgcaatttttattcgttgtccaatcgcttgaaatttgttttatattaactacgtggtatgtaaatttgcaacaagtataggtaaaataccccaataatttatacagcattttctactttaaaatataattattttttatcatttgtagtaaataattaccagataacattgactttagttttaatgattaaaatataaaagtagaataattataaaaagtattgaaaagtttataaatatatataataaaacttaatgacaagatattagatataaaaaataattatcttataaatagattgaaatttatgaatattcatactataatttaaatataaagagatgtcctttaaaaataaaaattaaaaaatatttaatgctactacaataggaactagaactgcacttaataaatatacagaaattagatttggctcaatataaaatacaaatatagaatttaggtgttttttatgaaaaaaattttatatgctttatatagtttcattgttattatagctaattttagattaaaagaaaaaaattataactttattttattagcaatcttttttatactgctgttaattcaaaatggagttttaaaaacaggttatcaaaatagagctacattttatcaagataattattttaatggagaggataaaaatgataagataaaatttataactataaagatttttatatttttgtcattaccattatgttttaatatactattcaattatttaacttcttaaattatatttagatataggagtgttatgataaaagtaagattatgtgttgtttatattaaatataaagtgcatatagtgataaaacaaaagtttcatataaatgaagaaaaaatataaaataatttatttaactacttaaaaataaactaaaagggataataaaatagcttttaggttatggtaataaaggtatttaaaaagagtgcataagcactccaattgtgagaaatacatacacaaatcattattacaacaatgaaaaatgtacatataagagacgttttgtatttgttttaagtgataatattttaatactaactaaataattatcacaataataaaaaagaaaaaggagtattttgtactccatttgtcaaaaatataaaacttttatataagcttattataacataattgataaaagtgtaaagctatataatgaatttataaagaaaaataaaataaaaaagataaatcctaatcaaaggatttatctttttgtatagaaaataattattctattattaaatggcatggctaaactggataataatttattattactgctttcaatgttttttctccttgattatggtatgtatgaattgattcagctgaaaaacaaatagagtcattttctctaagttgataaatagagtcatttacttctaattttaattgaccttctataatcataatatattcctgtgatttttcagaatgaccaacagatgtataactatgaccttcttctaattccatttgaaataattcgaagtttctagttggtgtattgggataataacaataaagacgataatctttattttctgaaacttgtacatctatatcagtttttgatacaataaaagtttcattttgaggttgttccagtattgcagtatatggaacatttagtccacttgcaattttccaaattgtgtttactgttgggtttgagtctcccttttcaatttgcgaaagcattactttacttacgccagataattcagcaagttgacctagacttaagttacgttcattacgtaatctatttaaatttttagcaataacagtattaatactcatagtaactccttaaaatgtaaattattgacaaatataatttacgaatgtataatttatttaacattatttataatttacaaatgtataatataatgaacgttaaatacactgtacatccgtaatataaattatactgcataaagagttgtttttcaacggatgatagttgagagattaagggggaattgtaatgcgtgtacttaataatgttacagaggctataggcaatactcatatgttacatttatccaaaatagcagatgaatttggagttcaaggtaatatttatgcaaagatggaatacttaaatccgggatttagtaaaaaggaccgtgtagcattacaaatgattaccgaagcagaaaatgcaggtttattagttccaggtcaagcagttgtggaattaacaagtggtaatactggaacaggactagcaatagcttgtgcatgtaaaggatataaatttatagcgtgtatgtcaaaaggaaattctatggaaagagcaagaatgatgaaagctttaggtgctgaagtagttcttgtagaccaaatgcctaattcagttcacggacaggtatctggtgaagatttggcacttgtagaaattgaggctcaaaaaatagcaaaagaaagaaatgcatttagagcagaccaatttaatttagaagcttgtaatcatgcacatgaaaagtatacagcagaagaaatgtgggaacaattggatggaaatattgatgtatttgtagattttcttggaagtggtagtacttttgcaggatgttcaaaaacacttaaaaaacataattcttctatcaaatgttatgttgttgaacctgaaacagcagcaatttattcaggtaaagaaataactgaccaagggcataaaatacaaggtggaggatattctatggatttgccattagtagacaagaaacttattgatggttatattcaagttacagacgaggaggcaactgatgtagcaagaaaattagctaaattagaaggtgtatttgcaggattttcttcaggggcaaatgtgtgtgcagcaattaagttgttaaagagcagtgaaaaaggaaaaaatatagttttaactcttaatgatagtggtttaaaatatttaagtactgatttatatgaagaattgtaataatagcacaatagttatgcaatgttttttaaattaagtatatagatttaaattataaaaagtatctcaatgtgatttttgaaagttataaaagagatacttttttattttgtaaatatggagtatcctacttataagtattaagctatatagatattgatgattagctatgcaataaaaaagagtatgtgtttttgcatttatacatcataacttggaataatacatattaatgttctaaatgtatttaaaacatatgataaaattagaacaaacagatacaaggagataaacatgcaaaagagaattttaagaaattttatatttacgggtaaaaatattttaagtaaacttgtttttataataaaatataattttagtacattaattttatttgaattatttcataaaggattagccttattttttatatggccatctattagatatatatttgatattttaataaaaagtttacatatagtctacctaaatatggataattttataaaagttttgaccaatcccatgtcaatagttctgataatactatcagttataatactagctttttatgcattttttgaatttacctctgtaattatttgttttaataaatcgataaaatatgaaaaaatagggttatttgaactctttaaaatatcatttaagaactctataaaattgttatatcctaaaaatatactattatttatatttgtgatattaataattccattagtaaatacagttttaatttcagggtttataggaaaaatacaaataccagagtacatattagattatataaagtctgatataattttaaatataatctatatgatttttcttttaataatctatatttcggttattagatggatttttagcattcatgagataactttaaatacagaaaattttaaaagagcaagaaaagaaagtgttaatcttataaagagaaagattataagaacaattatttattcattaatattatctttagtagtagctattattggatatgcgatttatcatagtggaattatatttataggcatatggactaaatattgtactgatatggaatttttgaagaatgtatttataaatagatgtattgcatttgaagaatattttagattgattttatcaatattcatttttatattggacattggatttatctcagcaacttattatcaatataaaggagtaaatatttctaaaaataatattaaaaaagagaaaaaatctatatcaaaaattgtttttaatttagtattaatattattgatttcttatatagagtcagttgcattttcttcacatataaatggcatgtttaatacgtcattttcattttatacaacagcaattgctcatagagcaggagctgaaatggctccagagaatactttggcagcaatagaagaagcttcaaatgctaaagctgattatgcagaaatagatgttcaagaaactaaagatggagaacttattgtacttcatgattcaaactttaagagaactacaggagtagataaaaatgtttgggatgtaaattataatgaagtaaagacatatgatgcgggaagcttttattattatggaaaaggttattatgatgaaaagtttgttggggaaaagataccaacactcaaagaaatgataaaatattctaaaggtaaggtgaaattattaatagaaataaaacttaatggacatgaaaagggagacatagtaaaaaaagttgttcagttaattaaagaaaataattttgaaaatcaatgtatagttgcatctatggataaaactatattacaaaaagtaaaaaaactggatgagaatttactgacatgctattttatggcaattgcatatggtgatttttcaaagttaaattatgttgatatatatggaattgaatcaacttttgttaataaaacagtagtagaaaagattcataaaatgaacaaaaaaatcttcgtttggactgttaatagtgacagtttaattgagaaaatgcttgacctaaatgtagatagtattattacagataatccataccttatagagagtgcaatttattggaagaaaaatggatttattagtcaagtgtcagattatttattttaaatattctataattgtattatccagtaaaagagatattattaaaatcaataatatctctttttaacataaataaggttgttaaattaaggttattcttataaaaattgtgcttatcagctataaacaaggaataaaagtgaaaaaattgctctgagattattacagttaaaagagttttaagatgacagagagatagattgtcaactgtatatttaataaatcttgttatttattaaattttatataagtaaaatatataaattaataaatcttatgctagaatatatatgaaaaacaatataaatttggaggattaaaaacatgacagagcgagaaaaaatgttggcaggagaactttacgattgtggtgatattgagttgttaactcaatggcataaagcaaaagacctagtaagagattataaccaaacagattcctcggatttggaaaaaaaagaaaaaatattaaatgaattacttggtggtaaggataaaaacttatggattactgcaccgtattatgtagattatggaaataatatttattttggaaataattgtgaagtcaatatgaattgtacgtttttagatgataataaaattatcattggggataatgcactaatcgcaccaaacgtacaaatatatactgcatttcatccaactaatgctggtgatagatttggtaatgtcaaagaagatggttcatttgaattttgtaaaactcaaacagctccagttactattggagataatgtttggattggcgggggtgctattatcatgccaggtgttactattggagataatgtagttataggtgcaggaagtattgttacaaaagatattccaagtaatatgattgcatacggaaatccatgccgtattattcgagaaaacaaataaagttaaattttcttgcaaaatctcaaaaaacacctttcttactttatacatagggtattttccaatactttcacatccatattcatttgttaaatttttgtggaatgtagtttttatcacttctatcttacatttccaccattttttataaaagtcattcctttatagatttatttataatagtatatattctatttgatgtttgaataagcacttatttttaagtaaaatactaacttttaggttagtattttgctatagtatgatgattaagtaagaataaaatactataatacataaagcttaataaatataatttttattttacttagatattttcttttgattagtaatcaaaagtggttataatttttttaattaataagagtaatatttattttatgaaagaggattatattaatatatatttaaataggaaaaattgtaaaaagcataaaaataatataattaattaatgagataaaagtggataaaaatattgggagtttaatttttgtgaaattaaaaatattaaagctaatctacaaatatagaatatattctaagacgaattttcataattactaaataaaataaattaatcaatatagttttttaatataaacaaaaaataaaaaatttatataaataaaatgcttgtttttcttgtattatttatataaatattgaaatttgtctagttatacgtttttattgaccagttatgcagttgatattgaatattctaaatattggtgttattttataggtggtttaaacatattagggggattttatatatgatttgtatgatttatagagaatgtataaaatagtaaaggtttagagcatgtttagtggattgcagaatatgcatatagaatgattcttgtaaattaagttagacataggaaatatataatttgtattggatgattgattttatggtgtatgcttttaacttctataatgggaaagtaaagatgtactcccaatacatctttactttagcagaagttatagttacttataaagtacaaaaaattatatatttattagagtagataaatctaaaaaggtttttctagaaaaatttaattttaattgtatctacttactaataataagacttgatgtaagcaggtttcaactaccgtttctccatattctgatataaaatcatctaactgtgtatctaaaaaattacaataatcatatgaactactgatgtaagcagttagtatatgtgtacatttgtctatttctccaataaacatattatccatccccctaaaaaatttagtaaaaataaaaagtcgcattctattagtcaattaacataatttataaaattttttagtactagtttctataacttaactccttaaggttaaatattcccagttttaccaatttagttttattctacaagtatataatactagaagatgcttcattattcaacatgcttgtttgagaatagaaaatattctaaaattataattgtttttaaaaataagattcaagataaataaagttatatgcaactatttaataatctttccataataaggacagtaggttctattcttaaaaaactccatctttaaatttaaagaataactacaatttgaacaacaataaaatttccaatcaataaaaatatcaaaaataataaaaataattgaaaatgtataatttcccagaaaaataataaatgtaactccaataataaacacacctataaattataaaataatttaagctttatttaaggttagtattatatttatataagatttaagttttaatatatatgtgtaattaaaatgatttaggaggagaaatatattggtaaattgggaaataaaaaaattggctaaatctaagagtatgtttatatctctagggatattagtgttaatactaatgattagtatctttattacgcctgttttagaaacagaacgttattatatagataaagaaaaaggatgtatagaagatacgagaagtggtatcgacataggtaatgagaaatttcaaaataagattaatgttttaaagcagttttcaaatcaaacagatacaggtgaattttctaaaaaaattgaattaatgtcaaagaaaaaacttgataatctaagtgtgaatgaatataaggatattagtttttggaaagtatttaactatagagttacaaattcacttataaatgtaggaatgttaatcattatatctataattatatccaatatttacgtagatgaagtcgttacttcggtaaaagatatcatactatcatcaaaagagaagaaaaaagcattaaagtctaaaatatttgttgctttattagttccattagtaatttattctgtttatttaatgggaatatttattataacttgtatgcaacaaggagtacctgttaatggagacttagaatcttttagaatagtagacaatgtagttgcattgaaaactaatttaagtataacaaagtatgtaatattaaatataggcatagagcttttgatgtttgaaggatgggccatgatagccatatttgggtcttttataagtaaatcttcaatatcttcaataagtttttttatatttattatatctataactaagataatgtcggtaatccatatattacctaaaaaattactttcagttgtatcaaatgtaaattattatgatttgatatttggttttaataaaataataggaaattatctaggtgatattatgatatttaaagtgaatatagacattgtcaatatagcaataggacttttgatggcaatattgataggtgctatgtcattatgttttttagtaataaaatcagattatataagtagataaaaggggagttaagatgaataaattagaaatagaaaatctttcaaagatatatggtaaaaaagtagcaaacgacaagattacagtaactctggaaaatggagtttatggtcttctaggaccaaatggagcaggaaaatctacattaatgaaacaaataacaacgttgataaaacctgatgaaggtcagatactttataatggtgaggatatatttaaaatggatgctaattatagaaatattttaggatatttgccacaagaatttggagtttataaaaattttacagcaaaagaatttttacagtatattggagctttaaaaggtttaaggggaaaatatttaaatagtaagataggagaattattagatttagtaggtctttacgatgtgagaaataagtctataggaaaattttcaggaggtatgaagaggagagttgggatagcacaagttttactaaacgaccctaagataatagtctttgatgaaccaacagcaggtattgacccacaagaaagagctagatttaggaatttaatagcaaaaatgtctagagataagataataatactttctactcatataatttccgatatagaatcagttgcaaaggaaacaataatgattaaagatggcaaacttctaatgaaaggaacacacaaagacatattaagtcacatggaaaataaagtatataatgttcaagttaaaaatgaatgtgaagttgatgatatacaatctaaatataaggttgtaagtattcaaagtgatattgattcagtagtacttagaattgtttcagaggatattccaagtggggataatatacaaccagttcaagcaaaattcgaagatgtatacatgttttattttgatttggaagatgcaagggaggtgtagtagaaatgatgtatttagttaaagctgaaatgataaaaatattaaaatcaaagagtgtttggataatttggctgtttttaatatttttgggatttcttctgattagaaagtttgatgttttagatacttatgcagatatattttacaagatagaaggctcaatacctctaataggtttgataatgtttataataacttctggaaattacattaaagaatatgattctaatatgacaggtttaataaatacaactaaaaagggaaaaaaatcagtagtattatcaaaactagtagctaatggattaattttatctattattaatatttcttttatattgttagtaggaattagaggttttagtttttttgattttaaaaatttaaatgaaccgattcataacttatggtactttggaaatagtaatttaaatcttacagtaatacaaatgtatataattgttatattgactactatttttgcttcttttatatttgcacaaataggcttaacactttcatctatatttaaatcggctgtaattccatttatactaggtggattgataatggcaattccatactttagtgtaggttttataccagataaagctataaaatttatgtcagtgactccaaattggattatgatgagccaacaaatggttaggtataatgtaccaagtattttgatagttttttctatagtaatctcaattatattaatgatagtgttaactaaaataacatatgaaaattttacatcaagcaaaaggttttaactaaaaataatagtaattttatttatattttagtttaattaaaaataagataaatgaattttagataaaatatatgctaatatatatgtaaattattacaggaggttgtttatggaaaatcgtgttttaataatagatgatgaagtagaaatattgaagcttttagaaactgtcctaaaaaaagagggccttaataatatatatactgcaaaaactaaaaaagaaggattagaattatttaaaagtattaatcctgatttgattgtattggatattatgttaccagatggcgaaggttatgatatttgtaaagaaataagaaaaacctccaattctccaataatatttttatcagctaaaaccgaagaattagataagttacttggactagcgattggaggagatgattatgttacaaaaccttttagccctaaggaagtggcttttagagttaaagcgcatttgagaagattaagttattttagtgatgttcaaaacgaaagtaaaaatctaaataagaatgaagaaaaaattatatcatttggcccatatatattaaatgaaagtagggcagaacttataaaagatggaaaatctataggactgtctgcaaaggaactaaaaatcctatctttatttgcacataatcaaaatcaaattataagtaaagaaaaactatgggataaagtgtggggagaagattatgttggatttgacaatactataatggttcatataagaaaaattagggaaaaattagaggataatccttcaaagcctgaatatattctgacaataaaaggtcttggatataaattagcagtaaaggaagattagaatatgaagtggaagattactagaaattttatatttacaattgtgtttgtagctatatcagtagtaattataaatattatatctatattgtatgtgatttcaactaatagcttttttaaagttgtagattctggaaataatcctgaagaatttgcacgttcttttgaaaaagatttatatgaaaaagatggagaatttaaactatctaagattggagctgaaaaattagaaaaatcaaattcctggatacaggttttaaatgatttaggagaggaagtttatggagtaaatgtgccaaaggatactccaaaaaaatatacaccctttcaaatggtgaataattacaagtatatagaaacaaagtatgttaattttgtactagaaaaatatttaaacaaaaaacatctaaacataatagtaggtatacctagtagagatatatcaagaataattttaacctattctcaaaataacattaaaaaaactttaaataaagttatcattataacactagtaattgatagcgtggtagctttaggtgtaggatatttatttagtagaaaacttacaaaaccaatttcaagcgtactatggagtattgagactatggctaatggaaattatagtttatatcttaaggacagaggtatatatgaagaagtttttaaaaatataaatatgttagctgatactttaagagtaaatgaagttgagagaaaagaaaatgaagagttgagagaggaatggctggcaaatataacacatgatataaagacacctctagcatctatacaagggtatgcagagataattaatgacaaagattatgagtttgaagaagatgaaatacgagagtatacagaaattatatataataagtctaagtatataaaagatttagttgatgatttaaatttatctactcgattaaaaaataatactatagttctggacaagaaaaaaataaatttagtcagtttagtcagagatataataattgatattttaaatgataatagatataaaaataggaatattgaatttgaaagtaatgaagatttaattgaagtatatgtagattcaatcttattcagaagggctataaccaatcttatatttaattcaatagttcataatagcgaaggaactttgataagtgtagaaattgtaaaaaaagataatatagaaattataataaaagataatggaattggaataagcaaaagtgatttgaaacatatttttaaaaaatattatagaggtactaatacaggtgagatgcataaaggttcaggtcttggtatggctatttctaaagaaataatagagattcataaaggtaaaatttatgtaagtagtgaaattggaataggaacaaaaattattatagagataaaacaaaattaggagatatgatatggatttttttaaaaaaggtataagtgggtttactattaagattttagcattaatatttatgacatttgaccatatagcagcatttatgccacaaacaatgcaaataccaatttggtttcattgggtaggcagaatatcagcaccactgtttatattcatggctgttgaaggattttatcacactagtaacagaaaaaaatatataagtagattgtatatttggtctgttattatggctataggaaatcaaataattaataatgtattttcacatccagaaggagctataattataaataacattttttcaacattatttttaatagcgatttatttacaagcaatagagttcataaagaaatttagaaaagagaaagaaattaaatattttattataggattattgatgataatcattcctataattttaggaatatttacagtagctttactttttaaagtcactaacagagttattactttatttatgattttggtaccagtaccatttttagtagaaggtggaccaatttggattatacttgggattattttttatttgtgtagaggtaaaaagttcagtttgagtatttgttatgttttgatgtgtatatttatatttacaacaatgtcaaatggagattatagtttaaaaaattctattttacaaaattaccaatggatgatgattgcttctctacctttaatgttactttacaatggagaaaaagggaagagtatgaagtatttattttatttatactatccaatccatgtatatatattgtatatcttaggaatatacttaataaatggtttttgattgtaagtgatatttttaatacaaaatgaacaatatgaggattgttttaggtctattaaaattgttatttagatgagatttgtagaatatttaaatttatgagcagaaattcagttattgtaatttcaataacattagaatataatattataatttatttagaaatatatgatgttatatatggtttggttattaatgtaataataaaatagaggtttgatataaaattcaatacctctgttttagtgttttttatcctatatttatacttattttatttataaattagtgttttgttttaattaatattagtgcattttttatttattttataaaattagtcataattgtttcttcatattgtggttctttaattccagcttttttacctgctgatatacacttaagaagccatgccatgttttctcctagagttcgcatagtctgtaatccttcttcatctttcataacatcctctggagtaaagccatgtacctgattccaatactgtgatgatacaataggcatattgctgattgaaaaatatttatttagttggtcaaatgttgcacttgcaccaccacgtctacatgacacaactgaagcacctaattttgtagccatgcgacttccagctatgaaaaatagacggtcaagaaaagaagttaattgaccagttgcactagaaaagtaaacaggagaaccaataataataccatcaatattatcgagatcttcaatcaattcattaactttatcatttcgaatacattttccagtttcaaaacaggatgcgcaactaatacatcctgggattgcttctttacctaaatacagtatttctgttttaatatcgtgtttactcaatactttagtaatctcatttagtgctgtataagtacatccatattggtttgggctaccgtttatcaataaaactttcattataaatttcctccaatgaattttatttaatagattttctaagagatattattttttataaaataggattttcatgaatattatcaatttatatagaaatgtctaatcttagaatcctatttaaaataactctttttttagtaaatacacctcctattataaaattgactttcaattattcttacactataattttattataaattattctaaaaacaagtacgcacatttttgttcaatactaaccaaaaggagagtgtaatatatgagtatagactgtatatcaaatacagatttaagtgaaacaggatttagttatacactttcactgattagtggtaaatataaaatgataattctttactgtcttgtagaatttgaagttgtcagatataatgcattaaaacgttatataaatactatttcctataaaactttgagtttatcattaaaagaattagaagcagataacttgattattcgtactgaatatcctcaaatacctcctaaggtagaatatagtttatcagaaaggggaaaatctctgattccaattttagatgcaatgtgtgagtggggagagaggaatagaccttaattttgtatctgtagatgccataaaaagactgtgagtaaaattgtttgaataatctactcacagtctatatttaaattaatagttagtatttttaatttataaaatactaaaaaatttattatgaaatttcaccaccaatttcttttacatcttctttgtatataatacaagcttctatagctaattctaaaccttttactatttcttctaaagacatgaatggtgtattttttttatttattacctgtgaagttgtatatgggatgtgtataaatccaccctttatattaggatatttcttgtctatcatataaaggattccatacatcacatgattacaaacgaatgttcctgcagtgtttgaaacactagctggaattttattttcattcatatgttttaccatggcttttacaggtaattttgaaaaatatgcaggttcaccatcttcttttataatagtatctataacctggttaccttcattatcttttattctaaaatcatctatatttatagcaactctctcaggtgtaatgtcaaatctacctccagcttgtccaactgatattactatatctggattgtgctcttgaatagctttatctatagcttcaacagattttgtcataactgttggtatagttatctttatgatttctgcaccgtttatattattattgaccctttcaactgcttcttgagctgggtttattagttctcccccaaatgggtcaaatcctgttaacaaaattttcattattttacctcctaattatattaaaatcctaaaaagtacattactaatatgtgggctataattaataccaaagcaactggagcttgatattttataacaatataatcatttttacattctagcaaggctgctggaactatattaaaattagcagccattggagtaagtagagttccacaatatcctgctgttaatgctaatgctccaattatagcaggatttccaccttgagacaatacaaaaggaataccaattcctgccgttatgactgaaaatgcggcaaatgcatttcccattatcatggtaaatataaccatacctaatacataagctataacaccaaataatctgctatcagcagggactacaccagatatcatggttgaaataacttcgccgactccagcctgagtaaataaagctcctaatgcaactaaaagttgtggtaacatactagcaggtcccatttgttgaagtaatcttgagccatcttgaactgatgtagcaggttttgctttagttattataagggctgatattaatgcaattattgaacccacacctattgcaaattgagaagaattatcaaaattagaaaggctcatagctactactactgcagcaaatgctaatattaatgatggtataaatattttatttttaagtttgtctgcttgttcttttccaaaattttcatctggttcttcatactttgcaaatacaacttgtttagaaagtgttaataaactagataatattaatattattcctattatattggctggaatcaatctaccaaatatgaatggcagtgatataagtatccaaaataatgatgtaccatatttcttattgttatttatggtagtaaaagacttatatgctataacaatcattaaaaatcccattagtgcgtaaaagatttccaatgatatgtttataaaattttgcatttttattcctcctaaataaaactattttttatgacttttgtttaattttttatcatataaggtaaactggattgtagccactacaagtgctattactgccataatagtactagcctttacaatattaagtccagttacattgtatccaaattgagttagagtagatgctataagtaatactccactactacctgcaaataagttttgaccataaaaatttccatagttttctgatgcagcagataatgcctttatggcttcttcatccgattcttttagttcatcactattacttaaaccagcagcttgtgccataggattaacaagtggtcttacaaattgaggatgtccactcattcttattgatagagcaccagctatttgtctagctatcatgtatatagtaagtacttttcctgttgtaagtctttttaatttttctattaaagaaacagctctttgttttaaaccatatctttctaatacaccgattactggcagtgttaatatgaataatgatacacctctgtttgagacaaaagaatctcctaaaattgtaaaaatttgattaaaatctaatcctgcaacaattcctgttgccactcctgctaataatacagtaaataatgtgtcaattttaagtataaatccaattacaactatcaatataccgattagttttatcataaattgttctccttccatttctatatgttttaatttaaatttatttaatggataaagttaaactctttttatagtatttgcgttaataggactattattataaaatttaataaaaaatagggaagatgttttaaagtatcaaagtaaataatggttgtgtataggaatttgagtaacaaagattatattttaagctaatatgaattgattttgtaagtctatggtttaagtatatgtcaatatttgaaataggttttaaattagatattatattataaaaagagaatgtgtcaaacatagagacaagtgtatttttctcttttgaaatgataaaaatatatttgatttcatacaaaaagagagtgtctaatgaactttttagttcattagacactctctttttgttatgattaataaagcatatattaagagctagtttcattagatttcactaagaaaaataaaattttgataaagtttaaagactattttgagcaatattacttataaataaaagaatttatcatagaaataattagttttattttagctattaagatttattaaaaaattatctatattatcctgtgatattctaaaactgtcataattaccttttgaaacagccttcataataagtttatctaaaaatttcattttttctaatcgagcttcactaccaaaaattccaatagcatttgcactttctaataaggatgatggaaaatttgattttaaatatttatctgcttgttcagaaaagccacagcaaaggaaaatgccaacttgttttttgtttaataactctacattatcattacatagcacttgtattttttttgaaactgaaccaacatatatagaacttccaataataattttatcaaattttgataactcaattttattattattattaatatcaacaatagtgacattatctgatagtttattttttagtatatttgcacagtcttttgtacaaccatatttacttgaatatataataatagtattcataattattctccctttcttaaagcattttctacagcttttcgtatagtattactgctataagttgcagaagttatagcatccacatctaaagactgttgtttaataatacttgttgtaattttttcagcaggtttacctaaaagatggtcgtgttttaagatattaatattttggattttaccattattaacttcaacagacacagtagcttttaccaagttattatcagcacttccagtataaatgccatttttaacattattaatatctatatcttttactaccaagttttctggctttaagttgcttacaattacaataataatgcatataaatacaaagaatagagcaatagatatttttacatattttttctttttattagtagctttgttgcgaattttcattgtaaagtcctcccactaaaatatctaagaaattttctataagttgagaaaaattatgtaaagaatatagtttattttcaacaacacataaaacgaatcctaacaatgcacttataagcatccatgagcttttatctatattttttttgaatattccttgttcaattccaatggaaaggaatttatcaagcatttttataccattattgctaggagtattgtttgtattttcagatgcaaatataatattcattctactatgcatgatagcttttgccatctctggttcactagaaagagtttttataaagctagtcataatttctatgatttgtttatctattggtagtgatgagcaattattcataatgtcaatagcattactttctactgtgttataaagtttattggtcatatcgctgataatctctgctttgtccttgtagtaaagataaattgtagttggagaatattctatttttgtagcaatttttcttattgataaattttcatatccatgttggtttataatttcgatgctagcatccataatctttttcttcatttcttctttttcatttttacgtctttctttgatactcatataatcacctctttgcttaacggtgttaagttaatttacactgttattgtataatttaattttaatactgtcaataaattattaaataatataagttaatatatttttatggataataaattaatgttattaattgtaatatttaagatattattgtataataataatcggtttaaatgcgccacatcttattaaagttggttcataattctaaataaactttaataagatacattaaaatataataaattcttttatgctataaaatttattttatagctattaaatcagatgtttaaaaattttttaacagtctatagtttttaagagtctatagtaagtagcctaaaaatatgattttacatctgtacttgttcgagaactccaagtataaaaaactaaggaattatatagtggcagtatataattaatacccttagacacacctttttgaaagtggaaaaaagatgtgtagttctcctcgaccacaaatcaaggaggataaaaaatggaaaagagaaaagtaataattgattgtgacccaggaattgatgattctttggcaattcttctggctttaaactcaccagagctagaagtaattggaattaccacatgttgtggaaatgttccagcaaatataggtgcagaaaatgcactaaaaacacttcaaatgtgttcttcactaaatattccagtatatataggagaagaagcaccactaaaaagaaaacttgtaacagctcaagatacacatggagaagatggtattggagaaaacttttatcaaaaggttgtaggagctaaagcaaaaaatggagcagtggattttataataaatactttacataatcatgaaaaagtatcaataatagcacttgcaccacttacaaatatagctaaagcacttattaaagataagaaagcatttgaaaatctcgatgagtttgtatctatgggaggagcatttaggattcatggaaattgctctccagtagcagagtttaattattgggtagacccacatggagcagattatgtttacaagaatttatctaaaaaaatccacatggtaggtttagatgtaactagaaaaattgtacttactcctaatattattgagtttataaatagacttgataagaagatggcaaagtatataactgaaataactagattttatattgatttccattgggaacaggaaggaataattggctgtgtgataaatgaccctctagcagtagcgtactttatagacagaagtatatgtaaaggatttgaatcatatgtagaagttgtagaagatggaatagctatgggtcagtctatagtggattctttcaatttctataaaaaaaatcctaatgcaattgttctaaatgaagttgatgagaagaaatttatgtacatgtttttaaagaggctttttaaaggttatgaagacattatagactctgtggaaggagtgatatagtgtgaaaagaaaaatatgtgtaaaaactattacacttatagcttttggtatttctataaatataataggcgcttttatagctatgggattaagattacctgtatacttagattcaataggaactataatgatagcttcacttttaggacctaaatacgctgttgttacaggtgtgtttggaagtttaataagtggaattacgtttgatgtgtattctctctattttgcaccagttcaaatatcaaccggattacttgctggaatagcatttaaaaagaattttttaaggggtttaaaaactccactaggagtacttttatttgctattccaacatctataataagttcaataatttcagcatttttatttggaggtatgacctcttcaggttcatcctatatagtgcaaatcttgaaagtgttaggactgggagatgtttttagtgtgtttgtaacccaagtatttactgattatggagataagctgttagcagttgttttagtgaatttaggattaaatgcagttccaaaaactttaaaggtatcattgactggaggaaaatagatagaaaatggatagatatagtgagataacaaataaaaatcaaagagaaattgttctgcttaaaggatttccttgtatatggggaaagtgttctttttgtgattatatagatgataattctaatttagaagaagagatgaataaattaaatctaagggttttaaaaaatgtaactgggaaatatggagttcttgaagtcataaattctggaagctgttttgaattacctaaggatactttagaaaaaataaagtgtattataaaagagaagaatataaaaaaattatttttagaaagtcattggtcttacaaaaataggcttaaggaaatgagagagtattttgaaattcctgtggtatttaaaattggagttgaaacctttgacaatgattttagaaataatattttaaataaaaatgcaaattttaagactccacaagatgtaaaagaatattttgattcaccttgtattatgattggaataaaaggacaaacaaaagagatgatagataaagatatagagattatcctaaatacttttgaaaaagcgacagtgaatgtttttataaataattcttctagtataaaaagagatgaagagttagtgaaatggtttgttagtaagtataaattcttggatgaaaatccaaatatagaagttttatacaataatacagactttggtgtaggagattagcattaatttagtttaaatttaaaattgaaaagtttcttatgtttttgaaaaagcttctaatagttagaagctttttttgtagagttttatgttacaataagaaaaaaggaattaaggagcaattaaatgatgtttgataggggaaaatggaataaattggattataatgaacttttagaatatatgatgtctataaaagatataaaatatagagattttaataaaaagcttatacctggaacagaaaatataataggtattagagttcctaatttaagaaagttatcaaaagaaataagccaagggaattggaaggaatttttagaagtagcagaggatacatactatgaagaagttaggctacaaggtatggtaattggcaatataaatagtaattttgaagaaactttatactatgtaaaaagatttatacctaaaatcgataattggtcagtttgcgatgggttttgttctggtttaaagtctatgaaaaaatataaagaaaatatgtatgatatacttaaaaaatatgtttattcaaagaatccatgggaaattagatttgcattagttatgtttttaatatattatgttgatgataaacatattaaagaaatatttgaatactgtaataatatacaaagtgaagaatattatgttaaaatgggtatggcatggttgctatcaatttgttttattaaatgtgaagaggaaacttttctctatataaaaaataataatttagatgatttcacttataataaaatgctacaaaaaataattgaatcaaatagagtagatttagaaaagaagaatataataagaagtatgaaaagaaagacaagaagatgttgacggaggaatattaatgaataacaatgaagacagaattgacaaatttttagaacttcaaagcaaaggatttaaatttgcagagatagctcaaaatctaaagattagtcaaagtactttaagaacttttttaaataaaaaaggatataagtcagaaaaaggtaaatacatattaaaagacgaattaaattataataaaagtttggataatagaaacttggaagaagagaaagctaaggagtatgaaaaaagtaaaaagaatactataagtaatagaaaaaaagtaagcaccaaaaaaaagatttctaatgaaaaggctttaagtaaaagtgttgaacaaattgagtttaatgatacaggtttaaaaaatgcaaagcgaaaacaaaatgttaagcctaagaaagatagaaaaataaatataactcaagaagatttagataagctttgtgaagtatatgattggtatttagaagtaaaagattacaatataaagcctaaaaaagtatctaataaaaaagatgtacatatagatgatgaacacatagatgaattaaaaacaacaagaatacgtatagataaagaaatatggaatgattttgaaagattatgtagtaattcgaattttgaaaaacatcaaatacttacacaggcattgaaagaatttatgaaaaagtataaaaatctactataaaatactactatatgaggtgcttaatatgaataaaatagtaaaaaaatcaatttctctaatgattatattaacaatatttatttttatgttgacagcatgtgaaaaagatgaacagcctgattcagttgatattcaaacagaagataaaaatgagataaaaatagatgagggaaatgcaaaagtattgaatataggaaaatcagaaattataaatatagatgaaggtgataaagtagatacatcaacaaaggtagaaaataattcaacatttaatatatccaatgttgaattgatatataatgaatatgatgagaataaaaaaattatatcttcggatagtaaggctttgttggatatgactttaatgcctgggaaagttgcttacatagaatgtgggcataaaacttttgtaaagggtgtagaagtttatgcatatgaatatgaggcagagggtaagattgtgtatgttaatttaaaagaaaatactattaatataagaaataataatattaagctagaaaatagtagtcagtatgaggtgctatctacatcagaacttaaaaaagtaaatgaatcaaatgagggaattacgtatcaagtaaaagtaaaaaattcatcatcaaaagatttaggaaatattattcttaagacagcagaagttaatgaaaatggagaatatttaacagtaaatcgtgtaccatcatataagattttaaagccttcagaagagacagatatagatatattgtgttcaacaaaggcaaaaagtgttgaaatagtgggatatacgtatgatgatataaaagaaaaagccaatgtggatattgacttaaaatctcataaagttaagatagacaaataaaggtaggggatacttatgaaggttttaatagttgaagataataagatacttttagaaagtgtagtagaagaacttagcaagcattttgaaactgaaaagtgtgaagatggagaagaagctttatacttagtaaatcaaaatatatatgatttagttattttagacttaatgcttcctaatataaatggatttgatatcctaaagaaaatgagagttaataatatagatacacctgtacttatattgacagcaaaagaaacattagatgacaaagtagaagcatttactataggagctaatgattatttgacaaaacctttttatatggaagagttagtagctagggtatacgctatattaaggactaatggaaagataaaagaaagaaacggattagaatttaaatctttatatttagatacactagaaaaaagagtgtatattgaaaaagaagaaataaaacttcaaaacaaacagtttaacttgcttgagtattttgtattaaataaaggttcaattttattaaaagagcagatttatgatagaatatggggaattgattcagatgcaactattgaaatagtggaagtatatgtaagtaatctaagaaaaaagctaagtaaatatggatatgataaatatattaaaactaaacgtaaggtaggatatatattcgatgataaataagaatgtatttaccagtactaaaaatcatttaataaaaatgtatattattgtagtaggtagttttttaataatcttttctatatttatatactcatattttaggggacttacatatagtggaattgatagtgagataaatgatgaacttgaatatatagtctctcaatttaaaagaacttcatttttgaacccaataagactgaaagatcctaaagatatggtgtatgtatatgaagatggaaggataagttactatactcaaaatgaatattttgatgagttacttccagatagaagactagataaaaaaaattcgttttttaaatacacagaaaatggatatacttttagagaattaaatgtagatgtaggtagataccaaatacagataattagaaatatagattctgagatgaattctttaagacagcttacatctgttcttataattggaatattaatttctgtaataattacttactttgtggctgtatatctcactagaaaagctttaattccaatagaaacagcatggaaaaatcaagctaagtttatacaagatgcttctcatgaattaagaacaccaataacaatagtttcatcaaaattagaaagtatgttaaaatccccagaaagtacagtaaatgatgaagttgaaacaatagctactgcaatgaaggaaactagaagacttaaaaaaatgataactgatttattgtctcttactaaagaggactctattgttaaagttaatttagaagaaatagacttagaaaaattattggaagaaatatcagaagactatattgacattgctgagtttcaggaaaaaagattcgtgtttaattctaaactgaagaataaagttataataacagataaaaataaattaagacagcttatattaattttcattgataatgcctttaaatatacaaaattgggtgatgagatagcattagaattaaaagaagatatagaggatgaggtaactttacttataagtgacactggtataggcataaaaaaagaagagatacctcttatatttgatagattttttagaagtgaaaatgtaagaaataaagatttagaaggttctggaataggactttcaatagctcgcatgattagtttaaacttatctattgatataaatgtaacttctgatgtagatattggaactacatttgaattgtcaataccaaaaaagttaaaataataaaaatataaaaaattgtttttagaaatgaagaatgggtatactaattagtataaaatataaaaagaccttataaaagtaaatttatatttataaatttcatagtataattatatagggataataaagtttaataggaggatttaaaaatggcaaaagttataaatacatctgaatttagaagtagtgttgaaggtagtaagggagtagttgtagttgatttctttgcaacttggtgtggaccttgtaacatgttgggacctgtatttgcagaattaggtgaagagatgaaggataaagctagatttgtaaaagttgatatagatgagagcttagaaatagctcaacaattcaatgtatctacagtaccaactatgattatatttaaagatggaaaaccagtagaaactttaattggattcatgccaaagaacaaaattgaaatgcaagtaaaatcatatttataaaaaatgggtgagtattatgagatatgatatagctataatcggcagtggtccagctggattgtctgctgctataaatgcaaaaataagaaataaaacaattatcatgtttggtaatgataatttaagtaataagcttgttaaagctccttcaatagataattatttaggtttttatgatataagtggtgatgaattaaaagacaagtttaaatcacatatagatagtatggatatttcaattgaaaataaaagaataaataatatttatgctatgggagaatactttacaataatgtctggaaatgatatgtatgaagctactactgtaatccttgcaactggggtagagtatactagaccaatcaagggtgaagaagaatttctaggaagaggtgtaggctactgtgctacatgtgatgcaccactttatagaaataaaaaggtagcagttataggatataatgaagaatctaaagaagaagcaaattttttaagtgaactcacttcaaagacttattttatacctatgtacaaaaaagataatcttatgagaagttcagataacctagatgattctattgaagttatacatgacagaccagtacagatagatggagataaacttgtaaacaaagtatcttttaaagaaaaccacattgaagttgatggagtattcgttataaaagatagtacggctccaagtgcattggttcctggaatagagattgatggcattcatattaaagttgacaataatatgaagactagtatagatggatgctttgctgctggagattgtgttggaaaaccctattcttatataaaagcagctggtcaagggcaaatagcagctttaaatgctgtttactatttagataaattaaagagggcttaatatttatattgattaactttttaaagatatttataaaaaactgtcttgaaataattttattatttcaagacagttttttatttttaagttattaataaaagtattttaaaatctatatgtaattacttttattaataaaattcaaagttatattagtagaaattggaattatttataatatactccaaaatttaaaaataatggttgaaaaatctaattaagagtactataatttaattaagtaattacttaatcaaaacgaggtacttatggaaaacttggttaaaatatttaaagcattgagtgatgaaactagacttaacatacttatattagtatccaagagaaatatatgtcaaaaggggatttctaaatatctagggatttcagattctgctgtttcacaacatataaaaatattaaaagatgttgggataataacaggatataaagaaggatactatgttttatatcatattaataaagaatcatttaatatatgtgtagattttataaattctatgttaagtaattctagtgaaagctttatagatgtatttgatgtaaatacaatacatctaggatgcagtaaagaatgtaaatctataaaaaaatgttgtaagagaagggagaaataataatgaaagtatgtataccagtagaggagaataaaggattggatagtaaaccatatggacattttggttctgctccaatttttgttgtgtgtgatttagaaagtggagaagttaaatctttagataatggagatttagatcatgaacatggaaaatgtcaaccattaaaagcattgtcagggacagctgtagatgcagtagttgttggaggaataggacaaggagctataattaaattaaatggaatgggaataaaagtttacagagcagaaggtgatactataagtgctaatttagacttacttaaaaatggaaaattagtagagtttccatcagaccatacttgctcacatgacggatgtggacatcattaaaaaaaacagctgatgaaatatatacttcatcagctattttttcttttaataaatacgattttattcttttaaaaccaaaatttagatttttatgttttttgtagtatccttaataatatttcaagtttacaagtttactacttttagattttttttgtatgtttttctatatagtcaatatcatttaatatgtcattgagttctttattaagtgtttttaaatcatcaccatctacattgtagtttaaaaatagttcctctacattatcaatgatagaattgacttttctagtaacttcaacaaatgtcttaaagttactactatttttagcatttagaaatttttttaaatcctttgatataaatgatactatttcatattcatcattaaatagacctctaccaataggatatggttcaattctctgtaaaaaatattggtctttagcattaatattataagtataagatatttcccaaccgtctcctaaatcaaacttgataaaatataatgtactacttacttttgatattcttgtggcaccaagctgtcttaaaagaacttcaatcgaatcaccttgaacagtattaatattcatatatacacatcccctttagtattattatactatattttttaaaattttataattaaataaacagtagatataataatagatataatcataagtggaaaacctattttgaaatactccttaaaagagataggatgaacgtgtttattacctatacctgctagtacaacattagcagatgctcctattagtgttccatttcctccaagacaagctccaagagatgttgcccaccatagtggcattacatcaataccttcagcttgcatagtcaaaataagaggaattagtgttgcaacaaatggaatattatctaagaaagaagagactatagctgataaccataatatcaacaacattgtaaatacaagatgtccttctgtaagtccaatcaatgcttgagccaatttgtttattatcccaacttctactagtccaccaactactacaaataatcccataaagaataaaattgtggaccattcaatacctgccataatttcatctacatcttgttttcctattaaaagcattatagatgctcctgtcagtgctacaacagaagaatctatgtggattgtactgtgaaacataaaaccaaaaagtatgaatgctattaatataaggctttttataagtagaggtttatctttaacagattttttttcatctagttttaatattgcatttttagctctttcattcacaacaagttcttttccataaataaatctaaagcatattatagttatagcaagtattactataacagcaggacctaaatttattacaaaatccataaaactaagattggcagcactaccaatcataatatttggagggtctcctataagagtagctgttcctcctatatttgaagctaaaatctgtgttattaaaaatggaactggattaagtcctaatatttgtgtaataactatagtcattggtccaataagtaagacggttgtaacattatctaatacagctgataaaatagctgttataatagcaaaacaaatcattatcttccatgggtcacctttagctttctttgcagtccagatagctatatattcaaataaccctgagtttttgacaacagctacaaatagcatcataccaactaatacaccaatagtattgaaatctatatggcttaatccttcatcaagtgtaagtatattgaatattatcattaatagtgcaccaccaacagctgctacggatctgtttaccttttctgtaataatagctgccataactattaaaaatatacatatagctattatttgttgaaattccataatataagtacctccatttgtattattttgtgcctaatgctagtactatatatagtattacttttttattgttttttcaatggatgtatgaaagtatattatttaacaaagtttttgagaaattgacagaatttaaagaaaatttttgttatttaaataaattttaaaattattccattgataataatattaaacgacaaacgaaaaaatataccctttaaactagaatttattgtatccaataacaattataaaatattaaatatatctatattataaaaataataaaaaaaggtttgatttgaatataaaactgcaatatattaaaaaaattattcattttaaaccttgtaatttgattttataaatattataattaaattaatgaatttttaacaaggaattattcatttttttgattttaagatttattgagaaaacaaaactaaataggggggtaattaatataatgaattttttaaatggtattttaacgagtattaacaatgcagtagtatttgtaaacaattacttatggtcgtatatcttaattataatgttagttgtaattggtatttactttactattaaaacaaattttgtacaattcagatattttatagaaatgtttagacttctgggtgatggtacagcgaataaaaatgcaaaaaaggaaggaaaaatctcttcatttcaagcattttgtataagtacatcttcaagagttggaactggaaatatagctggaatagcaattgcagtggtagcagggggacctggtgctgtattttggatgtggcttatagcattaattggttctgcatcaagctttgttgagagtacattagctcagatttacaaagtgaaagatggtcaagcttttagaggtggaccagcgtattatatggaacaaggtctaaataaaaaatggatgggtattttattctcaatacttataactatatgttatggttttgtatttaatgcagttcaagcaaatactgtttcacttgcatttaataatgcatttggaataagtaaaatggctatgggaataggtcttggaattttaactgcaatagttatttttggtggagtgcatagagttgcaaaagtttctgaaataatagttcctgtatttgcaggattatatatattagttgctttggctatagttgtaatgaatataacagagataccaagtgttatagcattgatagttgaaagtgcatttgattttaaaggaatggcgattggtacatttatgggagttgtaatgactggagtgaagagaggtctattttctaatgaagcaggtatgggtagtgctcctaatgctgctgcaacagcacatgtaactcatcctgtaaaacaaggtttaattcaatctttaggtgtttttacagatactataataatatgtagttgtacagcattcatggtattattatattcaggttatagtagtagtggagcaactggaattgaattagctcaagaagctttaactcatcatataggaccagttggaaatatatttatagcagtttgtatattcttgtttgcatttagttctatagttggtaattactattatggtgaatcaaatatggagtttatgagtggaagtaagactaaacttaatgtatttagagtttttgttgtaggcatggttttatttggttcacttactcaagtagatgtagtttggaatcttgcagacttatttatggcattgatggcgataataaacttaatagcaatagcacttttaggaaaatatgcatttattgctttaaaagattatacaagtcaaaaaaaatcaggaataaaagaccctgtgtttattgcagatgaaatagaaggcctagaaaaggtatcagagtggcatagggaattatctgaggaacatttaggataaaaaatagtataaaattataaaaccattttgaaagactagagtatgtatatgctttatatgaatataatattgaattaatttatattactggaatttttaattccagtaatatttttttattatataatttagctttattaaaagtttttattattaaaaatagcttatttatcgtaaagtgaatgatattggttttttaattattatgaatgttggtatttaatttaaagacttaaataaatttgccatttctagcgcattcatagcacaatcataacctttatttccagcttttgtacctgctctttcaatagcttgttcaatattttctgtagttacgattccaaatataacaggtaattcactgtctaaagatacttttgctatccctttagagacttcactacatacataatcataatgagaagtagcccctcttataacacagcctaaacagattatagcatcatacctaccacttttagccattttttgagcaacaagaggaatctcaaaagctccaggtacccaaactatttctatattttctggagaaacgtcatgtcttaaaagacagtcttcagctcctgataaaagttttgatgttataaattcattaaaacgagaatttattatacctatttttaaatcttttccaataagttttccttcatatatcatttttatttcctccaattttatttatgttatagatttatatttataaatatctttaattttaattataaaaaactacttagtagaaaaatatcatcatataatcatttatataatatctaaaagatgtcccattttatcttttttagtttttaaatatagcttattaaagtcattaatttcttcattaatagggattctattttcgatttttattccatatttctctaattgatttattttatccgggttattacttaaaagatttatactttttatgtttaaattttttaatatttgagcagccatatagaaatctctcatatcttcttcaaatccaagcattaaatttgcttcaacagtatcgtaaccttcttcttgaagtttataagccttaattttatttaaaaggccaatacctctaccttcttgcttcatataaattaaaactccacttccattttccacaattttcttcatagaagattctagctgtaatccacaatcacattttagagagtggaacacatctcctgttaaacattcagaatgaagtctaactagagtattttctatatttatatttccataagtaagggcaatgtgttcttcatttgaataagtatctctatatcctatgatttcaaaatttccatattttgttggaaggaaagcactagatactttttctatagtagtttcatttattttgcggtattctataaggtcttttatagtgatgatttttaaattatgcttttctttgaaaatcattaaatcatcaactcttgccattgtaccatcatctttcattatttcacagataagaccaatctctttaaaacctgcaagtctagcaaggtctactgaggcttctgtatgtccatccctgacaagaactccaccagtttttgctattaaaggaaatatgtgaccaggcgttttgaaatctttacttgtagaattttcatcacagaacaattttacagtttcagctctttcatatgcagatataccagttagagtatctgctccatctatagtaacagtaaaggctgtttgaaatgtatctgtattttctctaaccataagaggtatattaagacttttaaattttttttcagtggcaggtagacaaattagacctctaccatatgtagccataaaatttattgattcaggagtagccatttcagctgccatcaataaatctccttcattctctctactttcatcatcaactacgattaccattttcccattttttatatcttcaatagcttcttcaatagtattaaacatgtaattcactcctttattatttttaaaaaccatttttaaataaaaaatctttatctatatttgatttatggttactactattagaatttaattccttgtagttattagccataaaattattaacatactttccaattacatcgctttctaaattaacaaaatctccaacattctttgtcaagagaatagtgttaattttagtatgaggtataatagaaaccttaaatatttcatcatctaaatatgatatagttaaacttacaccatcaatagcaacagaacctttgagtatcattgaagataaaagttttttatcaggtcgtatacttactaaaactgcattttcatctttttcaaatttgcagatagttcctttaccatcaacatgacctgttactatatgaccaccaaatcttgaagaaagactcatagctctttcaagatttaccttatcatttgcatttaataaacctaaatttgtggaacgaattgtctccatcataacatcggctgtaaattcattttttccgaggtttgaaacagttagacaaactccatttacggctatactatctccaagatttgtgccatctaatattttatttgatagtatggttacttttccactcttaccattagcagtaatttttctaagtattccaacttcttctactatgccagtaaacatcctaacctcctatatgaatgtattaacaaaaatttaatttaaaacatctgattctataagaatatcgccatctatcaaagttacattattgattgttaactgtgttgaatctgacaaatgatttattccttctccagaaacgaatgtaggtgcatctttaccacctataatcttgggtgatagaaataatttgactttatcaactaacttatttctaaagagactgtcattgagagtagcaccaccttcaactagaacagaatcaatgtttaactctcctaatttatacattacaaattccaaatctactaagttgttttttgaaggagaaattattgtttcaacattattttcttttaacatagataattttatactttctttgcaacatgtgaaaactatagttttactggttttatctttaaccaaattactattaagtggcaactttaggtgtgtatctattactattcttgtaggatgagacactttttcttgattgagcctgcaagttagtaaaggattatcgttcaaaactgtatttatgccaaccattatactttggtatttatttctgtatttatgagttagataccttgatgattcattagatatccattttgattctagtgattttgtagcaattttaccatctagacttactgctgattttacaatacaaagaggtcttttgttttttatatgataaaaaaatgcctcatttaaatctcttgcttcatcttctaatattcccacagtaacatcaatattgttatcttttaatttttttactccattaccacaaacaagtggatttgggtctaatgtagatattacaactctcttaatcttattttgtataattttatctacacaaggaggcgttttcccataatgagaacatggttctaagtttacataaagagtagagtcttttagactttgtttagcactgtttatagcatttacttcagcatgattagagccaaatttctcatgatatcctttgcctattatattactatctttaacaattacacacccaactaatggatttggatttacaaagccttctccatttttagccaattcaatagcttttttcatataataaatatctttttctttttgattcacaatatgtacacctcctgtttaattggataatttttaaacaaaaaaccctgagaattaactcagggtttagaataatctacaataaatgtttaataaaagtagaagaaaattgctctacaaaaacactcattaaatatcttcttccatccagactttactgtcggctttggaatttaaccaaatcaaccaagttttaccttggctcgcgggctataccgccgattgggaatttcaccctaccccgaagattaagtattaaatttatatttagaatgtatcataaattattttactttgcaaactatttttttaaaaaatatatgttaatatataatatagaatgtctataaactttgaaataccacgattgtgaatataaaaataaaaatttgaacataatcaggaaagaagtctaattaatttaaattaggagagtaatatatgaataaaaaacttttagaaatactatcaaaatactatggatatacaagttttagaaaaggtcaggaatctataataaattctatcttaagcgaaaaagatgtgttagctattatgccaacaggaggggggaaatcaatatgttatcaaattccagctttgattttagatggaatgacaatagtaatttctccacttatatcacttatgaaagaccaagtagatgccttaaagactatgggaattagtgctgcttttataaatagttcattaagcagcaaagaatttaatgaaatattaaataatattagaaaaaataattataaaatactctatattgctccagagagattagatgcacaagagtttattgagctaataaataataacaatgtaagtcaagttgcgatagatgaagcacattgtgtatctcaatgggggcatgattttaggttgagttatagaaggatttctgattttataaaaaatttgcctaaaagacctatagttacagcatttactgcaacagcttcagaagaggtaagaactgatataataaatttactgtgtttagaaaatccagattattatataactggatttgatagagagaatttatcaataaatatagtaaaatcatctagtaaaaataagtatattttagattatattcaaaatcataaaaatgagtctggaattatatatgttgcaactagaaaggaagttgaaaatatatataatggtttatctaagagaaatatatctgtatcaaaatatcatgcaggtttatctaaaaatgaaagaagtaaaaatcaagaagattttataaatgataatgtggatataatggtagcaacaaatgcatttggaatgggtattgataaacctaatataagatgggttatacattacaatatgcctcaaagtatagaaaactactatcaagaaataggtagagctggtagggatggagaaaaaagtgagtgtgtacttttattttctccaggagatgtacatatacaaaaatatttaattgatattggagttgaaaatcctgaaagaaaattatttcagcataagaagcttcaatacatgattgacttagtttacagtaattcatgctatagaaagacaatattgagttattttggagaaaattatatagacaattgcaataattgtagcaattgtttagtagagggtgaaatagtagataaaactatagatgcacaaaaagtcatttcatgtgtagctagaatgaaaagaagttatggtgttactactattgtagatgtacttagaggttctaagaataaaaagattttacagcttggattaaatactttgtctacatataacattatgagagattattctagtgaagacttaaagaattttgtaaatacattggtttctcatggttttttagatttagttgagactctaggcaatggaaatagaggtagttttcctactataagattaaatgagatgtctatgaaagttttaaaaggtgaagtgaaagtagagtttaaagaaattgttatgacaaaatcattggaagtagaggatgagttatataatgctttaagagaacttagacattcaattgcaagtgaagaaaggatagctccatatatggtatttggagatggtacacttagagccatgtctagtagttatccaattaataaagaagaaatgctagatatctctggagtaggagaaattaaatatcaaaaatatggtagagattttgaagcagtaattaaagaatatgtcgaaaaaaataatataaataaaaaaatagatgaaaaaaatgtcgatttaaagaacgttaatagtgatttcttagaggttaatacagataaagttttatatgaaaaactgttagtcattagagaagaatatgcaacaaaggaaaaattacctgcatatatgattttagccaataaggctttgaaagaaataagtggaagatatccacttgatgaagaacaattaaaagatatttctggcataggtggagtaaaatttgaaaaatatggagctaatattttggcagaggttaataaatatgtaaaagaaaataatattaatgttatttgggagaaaaagggcaaaaggaagttaatattagatggagaaagtagaaaaaataatgaaatagcattagatttgctaaatcaaggaaaagatatacaaagtatcagtcaagaaatagaagtttcattgtcaaccattattggatatgtgcatgactatgtaaaggatggacatagtatatcatttgaattaggactagaaaatttttataatgaagataaaaagaagatgattttagaagtttgcgaaaaagttggctatgataatttaaataacataaaaagaaaacttccagattcaataaagtatgaaaatataagagctgtgatgcttgactcttatcttgaaaacttaaaaaataatattatagcagagtaatttttaacttaataaaaataaaatttgtattattgtgttgaactaataattttgctgtgttatactgaatttgtaaaaataatgaaaaattagagctaggggcgctagaattggctagctgagagataaagccgtaacttacaaaccctaataacctgatcaagataatgcttgcgaagggaagctttttaatataattttattatataaataggcaaattattcaatgttaggagaaatttgtctaagtgtatatacgattataagagtgctttccaaacgaggaaaagcactttttttattttcaaaaactataactttaatcttggaggattgtaatatgaactatacaacacaaatggatgctgctagaaaaggcataataactaaagaaatggaaatcgtttctcaaaaagaacaggtagatgtaaatgaattaagagaattaatagcaaatggacaagttgttataccagctaataaaaatcataaatctttaagtgcagaaggtgtaggtaaaaatttaagaacaaaaataaatgtaaatctaggaatttcaagagattgtaaggatatagaaaaagaacttgaaaaagttagagtagcaatagacatgaaagctgaagctataatggatttaagtaattatggcaaaactagagaatttagagaaaaggttgttgaaatgtcacctgcaatgataggttcagtacctatgtatgatgcagtaggatatttggaaaaagaattaaaagatataacagaagaagagtttttaaatgtaataagacaacatgctattgatggagtagactttattactatacatgcaggtcttacaagaagtgtttgccaaaaaataaaaaatcatgagagattgactcatatagtatctcgtggaggttctttattgtttgcatggatggaattaaataataaggaaaatcctatttatactaattttgataaaatattggatatatgtgaagaatatgatgttacattgagtttaggagatgcttgtagaccaggttgtataaaagattctactgatggtgttcaaattcaagaacttgtagtattaggtgaacttactaaaagagcatgggaaagaaatgtacaagtaatgatagaaggtcctggacacatggctattgatgaaatagaagcaaatgtagtattagaaaagagattatgccatggagcacctttttatgttcttggaccattggttacagatatagcaccaggttatgaccatataacaagtgcaataggaggagctttagcatgtgctaaaggagtagattttttatgttatgtaactccagcagaacatttaagattgcctaatttagatgatatgaaagagggtataatagctgcaaagatagctgctcatgcaggagatatagctaaaaatgttaaaggtgctcgtgaatgggataataagatgagtaaagctagagctgatttagactggtgtgagatgtttagacttgcaatagaccctgaaaaagctaagagatacagagatgaatcaactcctactcatgaggatagttgtactatgtgtggaaaaatgtgctcaatgagaacagttaagaaaatattaaacaatgaggaacttaatctaatataatttttggctagtatgactggaataaaaagaagctgaaaagaggaggtgatttagtgaaggttaatgggaaggaaattgaatttgaaaaagatttgactgttatagatttattaaataaatataatttaaaaagtgatagagttgtagttgaagtgaatttagagataattgaagaatctaactacaatacatatgtattaaaagacgaggacattgtagagcttattagctttattggaggtggttaaaataaaaatatttgtaaatgaattattaacagatgttgaggaaaatacaactgcttataaagttagagatagctataacaataaatgtgatgtattggtgttaaatggatatccaattaaaacagatatgcccctttgtgaaaatgataaattaacacttatacaaaaaggagttaagccatcacttgatgaattggaaagcttgttgattgctagacatactccaaatatacataataaattaaaaaaagggaaagttgctatattgggattggggggacttggttccaatatagctatctctttagctagaataggagtgggagaacttttacttatagattatgatgttgtagaaccatctaatttaaatagacaacagtattttatagatgatataggaaaactaaaaactgatgccatgatagaaaatataaaaaaaataaatccatttataaaattaaataaacgagatatttttttaaacaagaacaatatggatactattaaggattcagatttaataattgaggcctttgatgatgcttcatgtaaagcacaggtatgtaattatgtattaataaatttaaaagataaatatttaatagcatcatctggtatggcaggttactatgattcaaatataataactactaagaagataaaagacaggttttatatatgtggggattttgtgaatgaagctaaatttggtgaagggcttatggctccaagggttgccatctgcgcaaatcatatggcaaatttggcaacgcaaatacttatagatatgtaaatattaaaattagatataaaaaagattgaatattaaaaaaatttaacgtggagggaaataatatggataaattggtacttggtggacatgaatttaatagcagattattggttggaacaggtaaatatggttcaaataatatattgcctgaggtaataaaagaaagtggaagtgaaataataacaatggcacttagaagagtggatttagacaataaacaagaaaacatattaacgtatattccaaaagagatgacaatacttccaaatacatcaggagctactaatgcagaagaagctgtaagaatagctagaatatctagaaaaatgggatgtggagattttataaaaatagaagtaatatcagatactagatatttacttcctgataatgaagaaactataaaagctacaaagatacttgctgatgaggggtttatagttcttccatatatgacaccagacctttatgctggaagaagacttatagaagctaatgcagccgcagttatgccacttggagctccaattggttcaaatagaggtcttcaaatgaaagaaatgataagaataatgatagatgagttggatataccaataatagtagatgcaggtattggaaaaccatctcaagctatggaggctatggaaatgggagctgatgcagtacttgtcaacactgctatagcttcagcaggagaccctgtacaaatggctagagcatttaaattagctgtagaaggtggaagagaagcatatattgcaaaaacaggaaatgtgtcagaatttgcaaatgcatcttctcctttaacaggttttttaggcaatttatagaaagtggtgattggtgatgagtttttatgatgtaatagaaaaatatagggattttgattttgatggatatttaaataatgttactgataatgatgttttaagaagtttatcaaaagacaagcttgaagattttgatatattaaatttgctttctaaaactgcagtaaaacatttagaagatatggcacaaaaagcacataaattaagtgttcaatactttggtaaaacagtatgtttatatacaccaatgtatatagcaaattattgtgttaatcaatgtgtttattgtagctataatataaagagtggaataaaaagaaaaaaattaactatggatgaaattagagaagagggagaagcaatttcaaaagaaggtttcaaacatctacttgttttgactggagaaagtagttttcactcaagtgtagaatatataggtgaggctatagaaatattaagagagaaatttccctctataggtatagaagtttatccaatggaagtagaagaatataagtacattgtagataaaggtgttgaaggattaacagtatatcaagaaacttatgacgaggaaatatataagagagtacatataaaaggcccaaaatcaaattatgaatttagactagatgctcctgaaagaggggcaaaagcaggtatgaggactttatcaataggtgcacttttaggtctaaatgattttagaaaagaaactttttttacaatattgcatgggaaatacttaaaaacgaaatatcctcatattgagctttcatattcaacaccaagaatgagaccttttaaagggtgttttgaggaattggtagatataagtgatactgatttagttcaagctatggtatgtatgagattatttgaccctcatgcagctataaatatatccactagagaaaatttagaaatgagaagtcatataatacctttaggagtaactaaattgagcgcaggtgtatctactgatgtaggaggtcattctcaagatgaacatgatactgctcaatttaagataaatgatgaaagtactgttaaagatgtggagaaaatgctaaactcaattggttatcagcatgtgtttaaagattgggaaagattttaaatgtatctgataacaaacagaaaattatgtagtgaggaacgatatttagaagttattaaagagtctatattgagtggtgtagaaaatataataataagagaaaaggatttggaatatcaagagctaagaaaattatatatgaaaataaaaactaaaatcaattgtatagattttcaagagcaaatatcagatgaaagtttgaaaactaatataaatcaaaaagagtgtagaaataaattcaaggttaattttataataaatagtaacattgaattttttgaaaaagtggattgtcaaggtatccatcttccttttaaattattcttgaatttaattgaaaataagtataattttaatgaaaataaaatactaggattatctttacataaagtagaggaagtagattatttagaaaaattaataagaaatcaaaatataaaaatagattacataacattatcacatatatatgaaactaaatgtaaagaaggattaaatccaaaaggaattgagcttttaaaagaagctaaaaagattactgatattaaaataattgcacttgggggaattttaccatctaatgtcaaagaaacattaaaatactgcgatgattttgctataatgtcaactataatgaggtctaaagatattaaaaaaaccatatcaaattataatgaaaagttgaattagtaaatatagtatattgaatttttaacttaaataaaaataaaaaagttatcttttaaattttaaaaggtagcttttttattttatatctttgctaataaaaaattgtaaaaagggaaaactttagtcagagagattaaacaatatcctagaaagatttaaaatttagtaaagtatggaggacattataatgactgacagtaaaaagaaacgatttattataccacacacttttacaataatatttttactaatagtcttgatggcaatattgacttggatagtaccaagtggtgaatttagtagagaagatgtagaaggtagaatggtagttgtaccagggacttatcaaagtgtagaaagtaatcctcaaggatttgcagatgtttttaaagcaccaatagaaggctttatagattcagctgaagttgtaggttttgttttaatagttggaggtgcttttggtattgtaaataggactggagctatagaagcaggaatagcttcggttatctctaagtttaagggaaaagaacttcttataattccaatatcaatgattttatttggacttggaggtacaacatttgggatggcagaagagacattaccattttatatgatatttgttccactcatgacatccttgggatatgattctctaacagcaatagcaattgtatttataggagcagcagcaggagccgccgcttcaacaataaatccattttcagttggtattgcacaggcactagctcaacttgctcctggttcaggagtaacttacagagtagttatttttatagcatatatactaataagtatagcatttgttatgtactatgctaagaaggtaaaggaaaatcctgaaagttcaatagtatatgaaatagataaaaataataaatcaatacttaatcaaacttcaacagaaataaaagaatttacttttaaagaagtatctgttcttgctatatttggaatagggatggcaataatgatttggggtgttttaagtcaaggatggtacattccagaaatatcaatgtgttttgctgcaataggtgtgctttctggattggttggtagattatctcaaattgaaatctcagaaagttttatagatggagcaaaagatttagcatctgcagctcttgctatagctttggctcgtggaatcgtaataattgctcaaaatggatttataatagatactatattaaattccgcagcagcctttctaggtgggcttccaaaggttatatttgtatatttatcatttttcttggaagctgcattggcatttttaattccatcatcttcaggtcttgcttcacttacagtacctgtacttgctcctcttggtgatttggttaatatatcggctcaagtgatagtaaccgcttatcaatttggtgtgggtcttacaaactttataactccaacttcaggagtactgatgggagcacttgcagtagcccatattccattttcaaaatgggtaagatttataatgcctatcttgttgattttgacagctgtatctctagtctttttaacaataggtatttatatagggttttaattaagtgtagttttatttaagatatttagtaatggtataaaatgataatatgttttcaataaattgccactaatttaattagtggtaatttattttttgtatttaaaaataaatgtatttacttgtattttgaattaatatctacttagacattgttttaattgttatattttcatttaattaagcattgatttatcgttttttatatttcatataacaatgcaaaaaataatttttatatagtaaatgacaaaagtttacaataaatgtatattttcttactcattccttaaaattactcatttagtttaataactctcatttcatatgtaaagttggtaaaaaaattaaaattaaaagtaaaaaactaaataaattaatgttaatttgaaatatatatgaaggtttttggagaatacttacttatgataggaaaaaatgttaaaataatagtgtaatcaaatataaaggactgaaataattaacagttattaaatattaggagtgtaaaaatttatgggattaaaagaatttgattttattgaagagtctattgatatgttgaggacaatgtcaccaacattagaaactatatcagatgaaatagaagagtattttgaaaatatcttggatgaaaagaatcaagaatatataaatgtaacctctagaataaaatcagaatcaagtttaagagaaaagataattagaaatagatatttaaaaaaatatggagaagcaagtaatcttattcataatgtttctgacttaataggcctaagaattgagtgtagatttattgaggatgaaaacaaaatatatagacttttgagaagatattttaataaaacagatgacaaaataaactattataataaagagaataagaatattaaattaaaactatctgagaggcaacccaataagcaaaaaaatggatttgaaatatataaaatagatggagtttttgcgtatttagatagagaagtaaaatttgaacttcaaattaaatctcttgtaaatgtgttttggagtgaaatagaacataaaataatttataaaaataatacatatttacttgctgataaatttataaaggatatgatggactctataaagaataatcttactatgatagataatcagcttttaagtatttataaaaactttcattcagggaagtcttttaatatgaaagtaagtaaaaaagaaattgaaaaattatttgcgaaactagtctatgacgctttttctgaaaagatgaataaaagtataggttttgttgtagattttaaaaaaccatgtgaaactatattgaactattcttttaataaacaagatataagtgatgaagttttaggtaattttatgcttgatgagtttgcaagattaaatgaaattgtaaacaaggatatagattttaatgagcaaatagaatttgaaagagaaccaacatttgatgataagttttgtaaagacctaggaaatcattttagaagtagattaaacacagaatttccatggaacctattttttagaatattatttgaaatagagccatataacaataccaaagactttgaaaactttgtagagtttataaaagaaaatgtgctactagaagaaaatagggagcaattattatgccaatttgaagaagatagcaagcttataattgaagatatatatgattgtatatttaatagtataagtgagattgatagtgttgaaattttatataactataatcttgaaaaaataaactttacatcaagtgaaatcataaattgtatatgtagagaatatgagtgttatggtgaatacttagaagaaaaagaaaagcttatgaatacatttaaagaaaagattattcaaatctttgagtaataggtcaatgctgaagtggcgctaatgcgccatttttcaaatatatatgaattaagtaaaattattttggaggaggcgatttgtatagagaaaacaggtgtaattttggcagggggaaaaaattctagaatgggtagagataaagcctttttagagttacatgataagctttttattgaaattgcaatagaagcatttaaaaactttgatgagttgataataatatctaataatgaagaattatattctaaatacgatattaaagtttataatgatatagtaaaagatgttggtccaattggaggaatatatactgctcttgaatatgcaaagtatgatatagttacaattgcatgtgatatgccatatctaaataatcaaatagtcgaaagaatagctaataaaatgaatgataaaagtgtgatttcagtgacaaatggaaagttacaaccattgtgttctggatataaaaagagtataataaataaagtatctttatgtataagggaaaatgatttaaagctcagaagctttatagataaaatagataaaagttatatatactttgatgaagaagatttatttttaaatgtaaacactgttgatgagtatgaaaaattaactaaagtttaattagctatggttgtaaaatagagtaggatttatatggaggagagtttatgaatttacttaaatgcgattcttgggcagtaatattaaataatagcgataaagaaagtaaagcatataaaatattagatgaacttaaaaggaatatgtacaaagttgttgctatagatgaagagaaaaaacctattgaaggaatagatgtgtatgaatgtttaaaagatgttccacacaatattgatgttgtagctattattgataaacaatctaagatggatgtgattttagaagaagtagagcttttggatatacaaaatatgtggtttgaaaaaggaagctttagtgaaatgatgattaaaaagactaaagatttaaaattaaatatagaatataatttaagtttatatgatgagttgactagataaaattatatttcttaataataaaaatataattagttaataaaacatattattttatagtatagattggttaataaaagtacagattggttaatgaaacattaaattacaatatttgttaaaagaattgtgagttacatgatataatgtattaaataggatactaaggagttgatatattatgttaatagtaactacagaaaaagtagaaggtaaaaagatatcaaaggttttaggattagtgagaggaagtacaataagagcaaaacatgttggaaaagatataggagcaagttttaagaatcttgttggaggagaacttactggatataatgaaatgctcactgaagcaagacaaattgccataggtagaatggttgaagatgcagaagctaaaggtgcaaacgcagtaatagcatttagactgtcttcagcttcagttatgcaaggggcagcagaaatgcttgcttatggaacagcagttgttttagaagatgataatagtattcttgaaaaataaaatataaatagttaaaaagaggcatcttttaaaaattttatggatgcctttttttatttgaaaaaactaatttgagaagaaattttaactattatgacaataaaattagggtgatattatataaataagtaaaattatattatataatgtatggtatagactttaaaaattttatttgtagagaaaaatatggacaatgttataataattatagaaattaaaagtacttacattcattatgtatgtgacatgtataattagttttatatttaatacagttttgaagtaatatcttcattttgagaacgttggaataataaaaaatgtatgtattataggtgatataaataaaaaataaatataatatgttatattgctgatagaaaagagaataaaagaaaataggttttattaaaagagatttttatttataggacttaatcaatgtatagaggggtgagaacatatgtttaatgttgcaattataacacttagtgataaaggatatgaaggaaaaagagaagatataacaggaaaaaagttaactgaatttgttgaaaatacaggagcttataaagttactgagtatgtacttataaaagatgataaggaaatgctaaaggaaaatattataagactttgtaatagtaataaaatagatttaattcttacaaatggaggtactggtttttcaaaaagagatataaccccagaagcaactaaggaagtgttggaaaaagaaataccaggtctgagcgaatatatgagaatgaaatccacagaaattactaaaaaggccatactaagtaggggtgtgagtggaataagaaataattctataataataaatttacctggaagtcctaaaggtgcagttgaaaatctaagttttataattgatgttttagaccatggcatagaagttttaagaggagaagctacagaatgtgccactaaaaaaagtgaatagtatataatctagatagataaaaaatagacaaagaggtagataaagtatgattgataagtatggaagaaaaatagactaccttcgtatttcacttacagataagtgtaatttaaggtgtgtctattgtatgccaccagatgtaaaatttgataaaaattatataaatgaaaatctaagctttgaagactacaagtttattataaaggctatggctgaacaaggtataacaaaaattagatttactggaggagaacctcttttatatcctaaattaaatgagcttataaaatttacaaaagaagaatgtggaataaataacataggaatgactactaatgctattgggctttctgatagaatttttgagcttgaaaaatgtggcttaaataaagttaatataagtttagattctttgaaggaatataagtataaatccgtaacaagaggaggaaacttaaaagatgtcttaaaatcgattgaatcttgtttaaacttaggtataaaagtaaagttaaattgcgttgctataagtgggtttaatgatgatgagcttaaagattttatgtttttaacagttaaatcaccaattgatgtaagatttatagagcttatgccattaggtgaggctaatagagtttataagaagggttattttaatgtaaaagaaatgattgaaaaaatatatggtttatataaagtcaaaaatgatgaaaaaagtacagcagaatattatatgtttaaaggagctaaaggaagaataggaattataactccattaagctgttcattttgtaacacttgtaatcgtattagacttacttctagtggtgcaataaaattatgtctacattcaaaagaagaaatagatataaaaccatttttacataaaccattgttatttagagaatctatgaaagatataataaaacaaaaaccagaaaaacatcatttaatagaaaataaatgtagtgatacaaataggcgtatgtatgaaattggaggataagtaatgttaacacatataaatgaaaaagggtatgccaagatggtggacataagtgaaaaagatgatactaaaagaacggccgtagctacagctacaattactcttagtaaggaagcattagaaaaagtaaaaaatggtcagataaaaaaaggagacgtattgtctgtagctcaagttgcaggtataatgggagctaaaaatacatcttcaaacataccaatgtgccatcagattaaattagttggatgtgatttagaatttgatgtagatgattatatgtctgctattaagatatacgcaacctgtaaatctcttgggaaaactggagtagaaatggaagctttaaatgcatgttctttagcagcacttacaatttatgatatgtgtaaagcagttgataaaaaaatggttataagtaatatccatcttgtggagaagactggtggaaaatcaggagattttaagttcgagtaaattaataatatattgggttaaaatttggaggaaatatggcgaaggtagtgtcaataaatataagtgagaaaaagggtgtaattaaagttcctgtaccatgtgcagagctaaaaataaatcatgggatagttggagatgcacatgcaggaaactggcatcgtcagataagcttacttggaaaagaaagcatagataaaatgaaaatgaaaggctttgaccaattaaaatatggagattttgctgaaaatgtaactacagaagggatagaagttttttccctgcctgttggtacaaagttaagaatagggcaatgtgaagttgaagtaactcaaatagggaaaaaatgtcacaatggatgtgaaattaagaaattgacaggtgactgtgtgatgccacgagaaggaatttttgtaaaggttctaaaagaaggaattataaatgtgaatgattcaatagatgtaatctaatgaagtcactattaaaatataattataagtaaatactattaagatttaaatatatattttaagagagaattaatttaaataaaatattttagttataaattggaatattggttatataaagctatgaatgtaaaatcatagctttttgtttttgaattttaaaatataatattttatttatatatattaaattatattttatataaaatcaattgtttaaatatatattatttatactgtaaatttatagataataaagtataaaaaaaatatattttgatgaaatttaaaaaaatacattatataaatatagtaatagtatgaaaatttacatataaaactaaaaaatgtaagtaattgactttttaagttgacaaaatattgcatatatattatgatataaatcataaattaactacaaatcaatattatatattcgtagaagaagaaagtagcataaaggaattttacagagagttagatttggctgagaactaatattggaatttatgtgaaaaggactttggagaatactattgtaattatgttagaatagtggtttaattcgccttaagaaaatgagtgagtaaaattaatttttactaataagagtggtaacacggatttatattcgtctcttggatttttccaagaggcgttttttattataaacttatttcagaaaatttaaaactatatattaaatgaaaattataaaaatatgatagttaataaatttataaattagaaaattgtaaaatatgctaaggtcagtagttttacgatttaaatggagggatgaaaatggaagaagaaaaaattaactatgctctggaacagattccagagaatcaaaaacgtggttgggtagctatgttttcagttttagtagcaataggtgtggatttatcatctgttattttaggcgctgagttggcacagagtatgccaatgaaacaagcaatattgtcagtaattgttggttcatttttttctgcaattttgtatactacatgctctttggttggttcatctacaagtttatctacatctatgataacaaagtatgtatttggagaagctggagcaaaaatattttctctagttataggggtttctctattaggttggtttggagttcaagtaggtttctttgcacaaaatgcacagataataataaaagatatatttaatttagatgtcagtatgcagattttaagcctaataggtggtctcttgatgatgagtactgcaatttatggatataaggccatggagaagttgagtgtgtattcagtaccatttttattagttcttatgatgctaactatattcttagcttttagagcaaatggaatttcagttgatgataatatgaaatctactatgacatttgcaggtggagtttctctgtcaatgagtataataatagttggtgcaattgtatctcctgatataagtcgttgggctaaaagtagaagagactgtgctctttcaagctttttgggaatacaatttggaaatgcttttatgataatagtttcgatagtattagtaaaatgtatgggaacttcagatattatgagaatttttattacattaggaattgctataccaggtataatagtacttacattagcacaatggactacaaatacaagtaatgtatattcagcatcattaagtatagctcttgtacttaagaaggctcctgagaaagtattaactatagtccttggtattatagcaacattattggctgtatttggaatatatgaaggttttataggatttttaaatttacttggaattgtaattgcacctgttggtggtgtatatacagcagaatattacatagtaaagcaagaacttaaaggctttgataaaggagtattatataaaccaatagttaaacgttcaatagtgtcttggataattggtatattaataacttacctttcaacatatggatttataactcttactactatagcacctttagatggttttatagcagggtttgtagtacaatctattattggaaaagtgctttgttcaacaaaaaataagcaagaaatagacaaagcagtataaagaaatttgtttataaagtataaaataaattagaaatatgaggagaaagtaacatgagatttttaacagaagaaagtgtagataaaatagcagttggtgcagcagtgcttggaactggaggtggaggtgacccatatgtaggtaaattggttgcaaaacaagccattaaaaagtatggtcctgtaaaagtaataagtttagatgaacttgatgatgatgctttggtagttccagtatctggtatgggttctcctgtaattacaatagaaaaattactttcagaagtagagttaactacccctttagaaataatggagaaattattaaatagaaaagtggatgttataattcctatagaaataggagggataaactcacttatgcctatagcagttgctgctaaaaaaggacttcctatcttagatgcagattctatgggtagagctttccctgaagctcaaatggtaactttttatcttgaaggatatgaggcatctcctgccgtaatgtctgatgaaaaaggtaattctgccatcctttatcctgtggatggaatttggtcagaaagattagctagaactttaactgtagaaatgggaggaagttcttctattagtgactataatttaagtggagctcaagttaaaaaagctgctataggtaatactcttacaatagctgaaactataggagggtttttacttgaaaataaatctgattcaaaaggtgctgttgagaatatactaaaagaattgtgtggatacaagttatttgaaggaaaagtaattgatattaagagagagttgaaaggtggatttactagaggacatgccttttttgctgggattaatgagtatgatggagagtattctatattattccaaaatgagaatttaattgccaaaaaaggtgatacaccactttgtattacaccagatttaatagcagtattagatttagaaactggatttccaataactacagagagaataaaatatggctctcgtgttatggtagtagcttttccttgtaatgaaaagtggagaacagaaaaaggaattgagacagttggacctggatactttggatatgatgtggaatataaaacagtagaagaattacaaggaaaataaaagtttaggaggaaattttgatgtatcgtgtaggaattgacgttggaggaacaaatacagatgcttgtatactggatggggaattaaaagtaattcattcagttaaggtggcaactacaaaagatgttgaaactggtgtttacaatgccttaaaaaaagttatagatgaaagtaagattgaccattcattaataaaatatgctatgcttggtacaactcattgtacaaatgctattgtagaaagaaaaagacttaataatgtagctatgataagaataggaaagccggccactactgccattcttccatttatagattggccagaagacttaagagaaaaaatagaattagattcaatattggtatctggtggatatgagtttgatggtagaaagataaatgaactttgtaaagatgaagttgtagagttttgcaatagaataaaaggcaaagtggaaagtgttgcaataagtggagtatttgctccagtaaataaacaacaagaagaagaagttgcaaaatgggttagagaaattttaggggatattcctatatctttatcaaatgaaataggtaatataggtatattagaaagagaaaatggagctattttaaattctgcattgtctcaagtaggtaaagctgtatctttaggatttgaaaaagcacttaaagacttaggtatagatgctcaaatatatttcagtcaaaatgatggaacattaatgaatttagagtatacaatgaaatacccaatttttacaattggatgtggaataacaaattctataagaggagcttccttcttatcaaaagtaaaaaatgcaatagtattagatgttggtggaactacaagcgacttgggtgtactatataatggattccctagagaatcatctattccagttacaattggaggagtacatacaaactttagaatgccagatgttttaactattggtcttgctggtggtacatgtgtaaaaggcgaaaaagataatataaagataggtcctgaaagtgtgggatatagaataactgaagatgcaataatatttggtggagacactctaactttatcagatgttgttacaaaattagatatggcgtttgaagatagaaaaagcaatgttgaaaacttagataaagagtattgtaatgaggtatataagaaggttattttaaaattagaagatgctgtagaccaaatgaagactagtcaagatgatgttgaattggttttaactggtggaggaagtataattgttcctgaaaaactaaaaggcataagcaatgttataagacctcctcattatactgctgcaaatgctattggtgcagctttaggacaaataagtggagatgtagaaaaagtatacagtttagataaaatgtcgagagaagatgccatagaagatgcaaaaaaagaggctgtaaataaagctctaaaagctggtgctaaagaagatactatagaagtattaaatatagaagatgttccacttgcataccttcctggtaatgcacttcttataaaagtaaaagttgttggtgatttaatttaaagaataaatataagtatttccagaattatataaatatttctggactcatttttaaacttattttatcaataaaaacagcataacttttgactatattcttataagtttccgaacagccgatatatacctattttttgaggtttatcggctgtttgttatcttttatcgcattccaactatttttcttaccgtatttgctgtacgaattgtaatcttatcacttacatttgaactggcagtctttgaccaccaatttgtctttttataatctttacgactaaaagaccaaaagatagcatttttataatgatatactttttcatactcttctttaggatttccaacctcatcataaaactcgtcataagataagtcaggaaacataaaaataagattatcatatatttctttgttgttatctccccaccaattaggagcattatttagtatatcttttaactcctcttgtgaaataataaaaactggtatttccaattcaaactgtttttttatcattaatcttattgtatttgagataaccttgttgtcatctacatcacttaaaaagacaacattaccactattaaggtatgtagaaacttctgaataaccaagttctacaaagcttgcttttaattcagacataattatcttgttcttaccacttatattgatacctcttaataatgcgatataacttttcatataataagttcacctctaaacattcacatttttctatgtagtacaaactggaatttgcatcttttataattctttcaaaacttcttcatatgtaatttttttaatataaaaaaatcggtgcttaatttgtaccgatttttatttttcttagtaaagaactcgtttttttgcttctgctatagctctagcagcactttttgcttgcattcttttttcttcttcttttttaaattcatttattgtttcatttagattcttatcatgttcatttttttctttatcttcgttttctctgtatactaatatataatctattattgattcgtttattatctgagatatacttttattttcattaattcctattctcttaacttccttaagtagagtctcatcaatatgaaccgttgtttgctttgtattttttgccaccttaatcacctcttaaaaaaaattctaacattaaaattttttttagtcaataaattttaatattaaaattctttaaatgttttatttgattttctaaaattttctattgtatttatcatcttattttttatattttcacctagtacagaagactttagtctaggattttctatatggtcataaattggttctaaaaattcgacttcgacaggaacagagttaattttaccaataggttggtatccttcataagtatcttttgaattttttattacgagtggaacaatagggcattttgctttatatgctatctttaaagctccacttctaaactccgaaaccaatgaatttggttctttaatccatgttaaatctccttctggaaacactgccatactttgacctgtaagtatattttgagaggcttgggctatactctttataccctcacgattgttttttctgtttacatatacacatcttagtaattttgcccattctttaaatataggtatatttctccaaactggttcatctgcaattacacatccaattggtctttctacacttgctgttagtatgaagctgtcaagcatactagaatgatttacaacaaatagaagtggttcttttggcagtgtttccttaccaattatattaagctctatgttcactatatctaaagattttttagcttgtttttgcataaattcaaatttttcctttaagctaaatttatcaggattctttttaattttaataaggctaggtatagaagatgtaaaacctataagttgatatgtagcaaattttaagtaattattcataaaattatctccttaaaataaaattatttattactgtaaagattttaacataaaataaaatttaagtctattttaattcaattttgtaacatatattttaaatagacagagattgagattttatatttctaattttagtaatcagattttatcaataaattactattctattaatttaattaaataacctttaaatttaattataaaaactgttgcagaaatttctacaacagtttaaaaaatttaccttacaaaaacttattttataacaagagagtatattataaggctagtacagcccattttttgcactgagaaattcttttgccatcatcaccttgttctttgtcatatgcaaattgattaagcatttcacatggaaatgtatcacatagaccacaatgtataaggtttttatcttcacaacaagattttacaggacattgttcaccccaaaatggtttctcaatatctgtacaacctttacaattgactttttccttgtatccacattcataacataaaattccacatcttgattctatcattttaagtcactccttaaatataaattttattatgattgtatatcaaaatttatacttttcattgtaaaaatcggacaaattttttatataggttgttggattaacaccacaaatagatttaaaatcatttataaaatgagattggtcgtaataaccaatatcttgtgctaaagttgcaaatggtcttttattgttttgtacttcttgtaatacaaggtttatacgaagtaatctaaggtatgatttaacactcatcccaagagaattattaaaaattctatttaaatgtcgttcactataacaactaatttgtgaaatgtttttaacagacataatagagttctgttttctagcattttcaagaattggtatagtcatatctactatatttgatttcaataagtatgataagaataacatatctaattgttctactaattcctttatagtacttgttctttcaaaaatggaattaacctctaagctaaataatgtgttaaaatcttcaagtgaaatttttaaatctgtagattctctttgagaaagacctgtcaaataatatactccacctgggcgaaactcaacgaatactctaaaaagtacattttctatatcattttttacaatagtagtttttgttgtggctccccagaatgcgctttctataccttttttgtcaaatttaaatatcatacatccactagcatcaggtattaatgtaagcttttctttaatacttgtatctggaatagatattgtatagtgtgctatatactgtcttaacaatttatgtggcaaaatatatgtatactgtttgcaggtatttaaaatgttattgattattttattcataagtatatcctcctgatatataaaaaataagtatactaatttattttttatataataaaccagttttgttttaattgaaatattctaataagatattttgttaaatttagatacaataattgtaaagtaaaatctcaaaatatacaattattataaatcatagatatttattaaataaatatattaaagaagaaggaatataaaacaagattagaaaataatagtgttactttcataataaatacatataaagatatttttaagaataaaatttattattaaataaaaaataaaggagagtgatttaatcgtatggcatcaaaacaaacaccaagaaacaatttagaaaagtttttaagaataagagtcttatcacatacaggcgataaaatacatataaagttacctgtaaattttgcaaaaagaatgattgagaataatgctttggatttatttaatggaaaagatgatgtagtagatggtaaaaaggttactgaaatattagtcaaagcatttgactatgatttaactggagaagtagttcacttggagagaaaaaatggagatattattaaagtttcaattgtacaatagaattattttatatgaattttatttttgaatagttataaataattagaaatttgtaaaaaagtataatatattattagtaatggtgcagaatacacatttataatttatagatgtgtattttttgtttaaaaaatttaaatatataaaactataaaggttacaattttggaaatagatgtaaatatatgttctattgtataataagagtaatataaaatctagtaaaaataatcaaataaatttaacttatgagagggataactatggaaaataaggattttaaattaacaatatgtatatttgcttttgtaattggagtagtagtattattctgctgtataggtttgggtgaatttagtgcagagcatattattcaacaaaatggtggaatcatggatactgaccaatataatatttatctagaccaatctatttctcaatatagaaattttggttctatattagctctgttaggaggaatagggatattgtttgataaatatatcagaaaatactagagattatgttttgtctaaaataaattcttatgaggagataaaaaatggcaacagaaatatttactgtaaaaattacacccttagaagcacaaaaaatgataaaagaaaatattgatgcagatttagtttttagtgattcttataatttaggagatgataaatttatactaattacaacttttgagaagtattacgcaagaaataatagtgatgcaggattaatcgtagtttatgaaaataccacagaaaaaacagttattaaagctacttcaacaggcagtgcaattggagttttaaaaattgattggggtgcaggtggaaatttacttaaaagagtaaaaaacatacttgctgaatatattatttaattattttatctaactgataatatgtcaagaaaatctcgtaaaagaggttaagaatatttttataatatatagataaataaggatttgaaggtaaagtttttaatgtataaagaaaaataatataataaaacgaattggctttataattctttataaggcaaagagtacatttctttatataattgttggatattaaataatatgtaaatacaccatttacatataaaagtttaattaatatgttaaaagaaaatgaaatggaaattactaaaaaatacttttaaattggataatgattgatattacgtttatacaaaaatcaagtagaattttatatattttaaatatgatagtttaaaattatgaaagaatgataaattccagtttgtagggtagttttgataaataatattaataaatatgagtaaaaagtaggagcatattaatataatattcctacttttttattattaaaattgtttatgatatcaacactacattaaaacacaacctaaatttgaaaaacaaatagtttagaaatatgtactttttttatttattatattcttttaaatcgaattttttcatctgaacataaagtctcaaatctatatgcatctgtcatctcataaaaaccaaaaaatataaagccatcacgagaagtaaattcatattgtatattttcaattttcaacatgttttctacttcgcttattttttcgctatatataatttctaccatataatttatcattgtagaatccctcctattaatatgaaaatatccaaatatataataacatatttagatgatataatagtatccaaataaaaaataatcttattacattattgaatgaagaattaaaatgaagataaataaaataaatattggttataattgattaaaaaatagttatgtatacttgtgactttagttatgggcagttcaagttttatgaaagaagtcatatatatatggaatattctaggcagaagctgtttaataataagagaatactataaaaatttgagtattacataaaaaataagaagccataaatgatataagcattatctatagcttcttacttctcattgattaagattatatataaaaataatcactatattttttgtttaagttttaatacttgttttactatatttgttgagtggtcagaaattctttctagattagtaagtaagtcaagataaagtacaccagcatcaattgtacaatttccattatttagtctaatcatatgtgaatttctaaaagttttttctaaataatttacttcattttcaacttctaaaactttatttgctaactcaaaatctttaacatctaaaactattaaggcatccttaaaattagtaattgtcttattgtatatttcgtatatttctcttatcgcactatcagaaaaactaatgttcatttccttaacactcatggccaattcagctatattttctgcatggtcagagactctttcaatgtcatttacagtattaaaaagcaaatctgttctaaagcgttcatcgtctctaagaggttctttagaaagttttaacaaatagttcaatatatctttctgtaacttattgacaactttttctgactcaaaagctttattaatatcttcattgctcttatttaaaaatcctgcaattgaatgttccaaagagtttgtagctttatgacccattcttacaacttcttgtacagtattaccaagtgctatagatggagtgctaaacatcctttcatctaagtacttagtattatttactatttctgattcagtttctttaataggtataagtctatttgctaatttaactatgtatttagaaaatggtaataatattataacatttgtaagattaaataaagtatgtgcatttgctatttgtctagctgtatcagttgggtcaaaatgagtaactatggctgatataggtttatttaaaacaagcataaatattattgtaccaatgacattaaaacttaaatgcattacagctgcacgtcgagcatttctacttgcaccaacacttgataaaagtgaagtaacacaagtacctatattatctccataaagaataggtaaagcagatgatagaggaagtattccttgagaagctagtgctattaacatacccatagatgcacttgaactttgaacaataccagttatggcaaatcctgccaatatacctaatacaggatttttactaaaatataaaagtgcatcagtgaatgctttatattcagcaagtggagctactgcatctttcataaactccattcctgtaaataatataccaaaacctataagtatctcagataaatgctttgttttttgatttgatgtaaataaatagaataaaatacctatacctaaagcaattggtgcaattccttcaagattaaatgaaactaattgagcagtaactgtagtacctatatttgcccccattattacaccaatagcttgacttagattcattatacctgcatttacaaatcctacaaccataacagtagtagcacttgaactttgtataatacctgtaacgactgtacctaccagtacacccataacaacattacttgttaagagttcaataattttttttaatttgtctcctgctgatttttgtaaaccttctcccattaaactcattccgtaaagaaaaagtccaagtccaccgataaggctaattactatattcacgatatttcctcccttaagaaattaatagtttttttatctgaattataaactttattaactaaaatttattgtttccataatatagaataacaaattttgtcaatagaaatattaatgttttgttaagtatacgttaagagaatgttaaatttttaagttgttgttaattttagaaaatttatgatatatagcaatttaaatacttgaacttagatttttagtattttatgtacaatcaatttaacaaagaattaactataattgtaaaaaatatgtaaaaaaatagcatccttttagaatgatattttttagttataaatatttttatattcaattggtgtaaggttattaaactttttaaaaattatactatagtaattttgactattgaatccaattagtacagtaacgtctaaaatagacaagtctttttttaatagatactttttgtttttttcaactctaactttatttaaaaaattagtaaaagtatatccactttttttcttaaacaaagaaaaaaataacttttattaagttgtaattcattacatatattacttactgttatatcttctgagtagtttttgtgaatataatctatagttttctttaagttttctttacataaaactaagagttggtctatgtttcattttatcaaggcatatttattaaaaaatcaatctctatttgttaaaataatttatgaatgatgttagaaactgtaatatattggatataatataataaacagataaactctgtattaagaggatatatagtttatcttaattataggggaagtgaggatatattatggaaagattaatggaactcatagaaagaaaatttttaaaggatgtagaacttttagaattagaagacatagaaaatgtaatagaatgcaaaatgacacagccatataatgctcattataatgaatacttagtaaaagtaaaaaatggagatgaagtagaagaatattttgtgtatttaaaacatagataaacataaaagaggtttatatttatttgtatgattataaaataaatacaagcctctttttttgataaatataaaattataaaatttttatttatttaattttttcaacaacattagtcaatattgaatctaaatcatcactaatttctgtaactccattatgagtaatatctataatttctttagtcataggaagttctcctaaaagctctaagtctaaatcatctaaaaacttttcagtagattctccttcaaataacttgatttttttagaacaatcaggacattggatataactcatattttcaataactccaaggacatttatgttcatttttttagccatattaacagcttttgatacaatcatagataccaaatcttgaggtactgaaaccataactattccacttataggaatagattgcataaccgttaaggcaacatctccagtaccaggaggcatatctattaataaatagtctaattcttcccaaagtacatcagtataaaattgctttacaactcctccaagtaaaggtcctctccaaacaacaggttcattctcatcatctatcataaggtttatagacattacttttatgttatttgagttttctacagggtaaatataagagccatcagaataagcttttacattttttacacccataagtctaggaatacttggtccagttatatctgaatctaatataccaaccttatatcccattttgtttagcttattagcaagtaaagcagttacagttgattttccaactccacccttcccactcataacaccaattatttttccaaatttattgttagggttattttcaatagaacaatttgattgactattacaatttccctttgatggacatgaattacaatctgccatatctattacctccaaactttaatatttattagattatttgtaacctacatatactattttagtacaattgaaccataaagtcattatttaaaagcaacttagaagattttctattgatttattcatagactatagcaaaaagaatacaataaaaaaattataacattcttgaaaaagtgattatttcaatttagttatagaacttagtcatataaatatatagaaaatattttaatatattatacataacgggttattttataagtttaactataaattaggtttatattttataaaaatttgttaaaaaaaacaattaaaaattgtaaagaaaaaagatataattagaactgtagtaataaatgttttattatagataatagagttttaagtatcttaaataatatttggaggaatatgaatggaattaagaccaagaagtgcaaaattagaagaatttgataaagtaatagaattaataaactatgtatttagaatatcaagaaatcataagccaactatgatggaagaatttcctcttttactaagtaaaaataatatagaaaatatgattataatatcagaagatgataaagtggtttctgatgtaaactatctaattcaagatgtatctattcaaggaaatagattgaaggttgcagctataggtggagtatgtactcatccagattatgaaaagagaggctattcatctaagatattggataaagtagaagaaaaaatgttttatgatggtgtagatattgtaattatatcaggaacaagaagtctatacagtagaagaaattgtagtttggtaaagagtttttataaatatacaataaaacctgaagatgtaaaaatagcatatgaaatagttgaatttgatgaaactaattttgaaaaagatgatgatttagataaaatgcttgaactatataatcaaaatagtactagatttataagaacgagagatgagtttcaaaaactattgcatgcagcaactattgcctggggaccaattggttacaagaaggtatttataaaggaaaataataatataataggatatttgataataagaacaataaaaaaagaagattctactgtaggagaagttgctgaaatagggttaaactctgtaaatgttgaaaatatattgaaatatgttgcaaataaatttggattagaatatttaaattataaagtacatgtgaaaaatcttaaagaccagttgaaatgtaatgggacagaatctttggactatcaacaaggaactatgaaaataataaattttactaagttgtgtgatagtttaagaagttattttagtcaatatgtagattttgaattactaaaatacatggaatttaaacaagttgaaaataaatatattattaaatacaaagaagaagaacttgtaatagaaaatttggataagcttaataaactgttttttgaaaaaaatgaggaacagtataatgaatttaaacatctaaaaaatatatatgaatttgctacaaaggcatttcctgtagattttccatggactgcaaatttaaattatcaatagttttagatgatattaaataaaattgattgatacctagagttagtccttgttaaataagagaaattattggatattgaaaaagcaattttgtaagtaattagaaaggatgagtattatatggacatacttgatgatatagcagaatgtatattaaatatgggtgtagataatatagagaatttagtaaaaattgctatagataaaaatattgatgtggaagatatttatgaatatggtttaaacaaaggtatgataggagctttagataagtttgagaataaggaatactatctttcagaagttatagtatgcacagatgcattaaataaaggtattaatcttttgaagggaactggaaaagtaaagaaaaaatcaaagggagtaattctgatgtctgtagtagaaggagatactcatgagataggaaaaaatattgtaaaagtaatggtagaagccactggatataaggttattgacttaggtgtaaatagaaaaagtgaagatataatagaagaagctataaaaaacaatgtagatataataggcttatcttcaatgatgacaactacaatggaaaatatgaaatcggttatagacgagcttaatatgattgagatagataaaagaccaaaagtaataattggtggaggacctgtaagtatggagtttgcagaagaaataggagcagatggatacagttcaaatgctccaaaagcagttaaattaataaacaaacttataggaggtgaagtttaaatgttttcagatatgactttacttcagtatataaatagtgaagatagaggtttttttctgcctgatatgggtacaaatggattgttcttaataaataaaaaggcatatgaagtatatgatagtgtagatttgcaattagaattagcaaagactatggacaagtattttgaatcagattttatatactcattctgtgatgggattacattttgtgaaactctgggtttagagacattaagaccagattatgattttccaagtgtattgacacatactataactgacagagataaattaagaaaattagatgttccagacccttatacgagtggacgtatgccactcaatatagagagcttatcagttatatcaaaaagtattaaaaaaccactatatgaatcgatacaaggtccatttacacttgcaggtcaattagctggagctactcaacttttaagatgtataataactgataaaaaatttgtagaagaattgttggaatttacaactgaattggtaagaagatatgctgtagctgcaaataaagcaggagcaaaatatatttcaatagcagagccaacgtcagtaaccctaagtaaagatagatttgatgaatatatagtaaaaaatttaaataaaatctacaatgaacttgattgttggaaaggtatgcatatatgtggagacaccagagaattattagataatatgctaagttgtaatatagatgcagtaagtttagaccaaattttagactatgaagaaattgctccaatgattcctagagatatagtgttgattggtaatttagacccaataaaacttcttggacgttctaagccagataagattagaagagagacactaaaattgttaaagaagatgagaggatatgataactttttatgtgattttggctgtaactgcttaaataccactccagtagaaaatttacaagcagctataaaagcaggaagaattaattataaagaattagataggattgatattgatgaattataatagtaataaaaataaatatcttttaaaggatataaatttagaggatatttttatagataagaatattgtgctaaagtttttggggtatggaaatagaaaagctccagatacaattagtgaaatcgttgaaagagaaataagaaatataaatgatattttagatatcaagatatatataagtgaagttgatattaataaaacacctaaagaatgtaaaaaagcatttgctgtactatatacaataggggataaaattgatattaagatgaatgactatatggaaaattgcaatatgatggcagggatagcattggataaaataggtatagtatgtttagattatattaatgagaaaataaaaatgtatttaaaaggaaagtatgatagtcttaaaatatcgcatgaaatatatccaggagataaagattttgaagtagagagacaaaaggatatttataactatgtaaaaaataaatataatagtatagaaatagaaatcaatgattatcatcaactatcccccataaaaagtgttgcaatgcttattttaatgggagatgaagaaaatttagaatcaagatgtagcaaatgtcctagaaaatgcttttaactagttttcaagactaagatttgttttgtgtatgaattgcaataatttttttggtcattttatgtataaactaaaaaaattattgcaaagtaatattctatttaatttgaacagacttacaaactatagtagtttctttaattcaataagtgtatttatttcataagttggtatatgattagtataatttatactgttattggaatttaaccaacaagtatctattcctgaatttattccacctaagacatcagaggttaagctattcccaatcattaaggcagaagatttatcatgacaattaaactttttgagagcgtatttaaatatttcaggatttggttttgatattttcaactcttcagatacaaccattccatcaatatatccttttatttttgaattttcaagtcttttcttttgaactgcagaaattccatttgttattataacaatagtatacttttttttaagatattgtaatatatcgattgcacctggaattaaaaatgtacattcacctaaaaaatttaagtacattttgctaagagtttcagaatcaacatccaaagatattttatttgcaaaaagttcaaatctaagtaatttaagttcattcaaagttataatatttttttcaaggtcgagccaaagcttatcacttatatttctatatgactctatataattctcaaaattaaattctaaatcaaactcagatagaagttttttaaaagcatgtgattcacttttcttaaaatcaaataaagtatcatctgcatcaaaaaatataaatttatatgtcttcatggtttttactcctttacaagatgactgcaaaaattactttactttcactatttgagtcattttgccatttatgctttgttcctaaaggaacttttacactatctcctttggacaaagtaaattcatcatcatccataaaaagtttaacttctccctccaaaacatatgcaatttcatctccattatgagtaatcctatcaatacaagaagaagtatttggagctaaatccataattgcaaattctaaattaccactagagtctggaattaaaatctcatatataacttctttgcttccaggtaaaataactttttttctattatcatgtcttactatcaagttttttttatctacttcagatacaaaaaatgtaaataaaggaacgtttagagaagaggctatagattttaatgaatttacagatggattagcaagacctcgttctatttggctcaataatgatggtgtaacatcagctagttttgctaaatctcgaatacttaagttttgtttttttcgaacttcagctattttttcccctaaatttaaatcattcatataaatatcctctctttttaatttaaaaaatattaacttaaaataatcaagtaaaatgattatgtagtatgaaattattataacatatagaattaggttttgaaaaaactatgttcaatataattaaataaattaaaatataattgacaaagtggatacagaatacttaaaatatatttaaataaaattaagcaaaagatagttaatttatgataggaggggacattatgcaaataacgacttttggagctatatttggtttattaatagcaattattttaattataaaaaaatttcaagctgtatatagtttaatgttaggagcatttattggaggattagttggaggagcaaatataacacaaactgtagattttatggcaaatggagctatgaatatatcaccatcaattcttagagctttggcatcaggtgtattagctggaagtttaataaaaacaggagcagtagataaaatatcagaacagattgtaaaaatatttggtgaaaagagggctttattttcgattgccatttcaactatggtacttgctggagtaggcgtaaatttggatgtatctataataactgtagcacctataggattatatataggtagaaaattaaattattctaaattgtcaatactattagctatgttgggagggggtaaagcaggtaatataatatcaccaaatccaaatactatagcagtagcagataatttttctgtcaatctctctagtgttatgatggcaaatataattccagcaattattggagttgttattacagttattttagcaagtatattaataaataaaggaaataaagtacaatcatatgaaattttagagcaaagagaagatttaccaagtttatttaaatcattatgtggtccaattatagctatatttctattgtttttaggaaatgtatctcctatagttatagacccaatgatagcccttccaataggaggaatcgtaactctaattgtcacaggaaacttgaacaattcaagagaatatttagcttttggattatctaagatgcaaggggtatgcatattattacttggaacagggactatcgcaggaattatacagatgtctgaattacaacagagtacaataggtgctttacaatttttaaatatgccacaatttttattggcaccagtttcgggtatacttatgtcattagcaacagcatcatcaacagctggtgctactatagcatcatctacttttcatgatgctataataaatggtgggctatcaccgatttcaggtgcatcaatagtaaatgctgggtctagtgtattcgagcaattaccacatggctcactatttcatactagttcaggtagtataaacatggatataggtgaaagatttaagttaattccatatgaagcattgataggaatagtaatgactataatttcaacatctattcaattagttttataataaatataaatatttaatgaaaaaagtaggattttgttattaaatattgaatttattatagtaaaaaagaagattggagttttaaagtgaataaaaaaaagattgttattatagggattatttattcatttttagtagtattttcacttacaaatatgtatgtaaatatggagtataatttaaatgtatttgaatatattaagaagtcacttccatttacagaagaagaaaaaaagtggttagaaaaacacaagaatttgatttacagctctgaccaaagttcacctcctttgagatataagggtaaggaagatggacagtataagggaattattgttgatttaataaattctctgtcaattcaaattggtagagatttttattttaaaccaaataattggtggaaagaatctttcgtaaattcaatagatgatagtataaagttttttgacttgattccatcaaaagaaagggcaaataaatttatatttactgacccaatatacactttgagtgcaaatatattgaaagataaaaagtcccaagatataaatagttacatggatttaaaggggaaaacagtagcaattccagaaggtgattattctataaattttttaaagcaaaaaattcaagatataaacattttattgactccagatataaagactggagtcaaccatttaatgtctggaaaagtagacgcagttgttggtgatgaaccagtattgcgatactatataaataattatggactttcaaataaatacagtgttttaagtaatcctatatatactaaaaaagcagttcttgctgtacctaaacaatatgaagagctggttagtattttaaataaaggcatttttaaacttcagaaaaatggagtgtataaagatttaaagaaaaaatggtattctacgtataatgaagttgatgatatattgtatgagcgaggaattgtgcctagtatttatctttttataggtataattttaatatcaatttatgttttttatagctatacatatttgttaaagatagaaatcaaaaggaaaacagaacaggtaatagaaaataaaaaaactttagaggcaacttttaatagtattacagatataataatgcttgtagatgaaaataacaatatagtagaatcgaacaaagtactatatgactttatgggtgaaatgagttataagatagcagatttgattagcatgataaaaggtgttattaaaaataccttctctgaaaatactaataaaactagtgaaatagaaatatacaataaaattttaaagataaacacttttcctgtagagtataaaaaaaataatactgagtatatagtagttcttattaaagatataactaatgaaaaaatagtagaggcgaaattacttagagaaaacaaaatgatatctataggacaattagcttctggggtagcacatgagataagaaatcctttgggtataataagaaataattgctatctattaaaagataacgttacaatggaagaagtgaatgattgtgttaaatcaatagaaagtaatgtagatagggcaagtaatataataaccaacttgttaaatttcgcaagaatatcagatgataatttagaacatataaatataagaaattttattgaaaatatagtgaaacttcaatataaaatgttacagttaaagaatgttgaaataaaaattgactgtgaacataatttagtatgctatataaatggagaatcgttaaaacatgtatttataaatttaatttctaattcaatagatgcaatacatcaagatggaaaaattattatatactgttatgaaaaaaatcattgtttatttatagattttaaagataatggtgaaggaataaaagaagatgccctaaaggacatatttaatcccttctatacaacaaaaccaattggtgagggaactggtttaggtttatatattacttataatgagattaaaaagaataatggagatataagtgttgaaagtaaattgggggttggaacttgttttcatataaaaattccattaaataaagaggtgactatataatgaaaatactattagttgatgatgagctagaatatggagtggtaatgaaaaaaattctacaaaagaagggctatcttgtagatatagcactaagtggtgaagaagctataaatataattaaaaaagataaaaattatgatttggttttatctgatgttatgatgaaaaatatggatggagtacagctattagatagaattaaatctattaatagagatatagaggttatattagttacaggatatggaagtattgaaaatgcagttgatgctatgaaaagaggagctttatcttattttataaaaagtaatcccattgaaaatttattagaagaagttgaaaaggtaaaggcaagtaaaatatctgtttctgtacaaaaaaataattttgaatttactttggaatctaaaaatagagattttaataatatcataaaaatagcaaaaaaagctgcttgtaaagatgttaatatattaatcttgggggaatctggtgtaggaaaagatatattagctagatatatacatagtataagtccaagaaagaatgagatatttgtacctgtaaattgttgttctttttcagaaaatctattggagtctgagttgtttggtcatgaaaaaggttcttttacaggagcagtagatagtagaaaaggtagatttgaactttcgaataaaggaactctatttttggatgaaataggagatatacctctaaatgttcaggtaaaacttttgaggacacttgaggacaaatctatagagaggataggaagtaataaatctattaaagttgactttaggttaatttgtgctatgaataaagaaccaaaagtggaaatatcaaatggaaatataagagaagattttttttatagaataagtacaataacaataactataccaccactaagaaagagaagagaagacttaactactcttatagaatttttcttaaataagtaccaaattgaacatgataaaaagatacactcgattgataaggaagtaaaggattttttattaaattacaattatccaggaaatataagagaattaaaaaatataataaatagacttgtagttttaagtgaagaaggcaatttatcaaaagacaatttaaatttaatatcaaataatgtatacatagatgataaaataagtattagacctttaagagaaataagaaaagagtttgaatgtgagtatattgaaaaagttttatctttgtgtggaaataatatttcaaatacagctaaaaaattggagattagtagaagacagttaaccaataaaatatcagagtataatattaagtgagaaaaaaacttctcattaagtgagaaaaaaatttctcaaactgtattaaaagataaagagaaaaaatctgtttatctttttttattataattttaaaaattaatatttacaataattattggtaaattcaatactggtgtaaattaaaaatgaaaatttctatgacattaatacatagaatatatattttaaataattggcatagaaaatgctttatatattaataaacgtaataaatatttttaattgcgattaaatatattaagggggattttcatatgaagctagagctagggaatatatttataaaaaatgttgaatttggagaaaagacagaagtaaaagatggagtactatatattagtagcgaagaaatagaaaagatagtattagaagatgaaaggattgtaagtgtaaatgttgaacttgcaagacctggcgaatcaataagaatagctccagttaaagatgtaatagagcctagagttaaaattggagatgaaagcaaaatatttcctggaattataaataaagtgaagactgtaggaagtggaagaacccatgtacttttaggagcttgtgttgtaacttgtggaaatatagttggatttcaagaaggcgtaattgatatgagtggtcctactgctaaatatacacctttttcaaaaacaaataatatatgtattgttataaaagcaaaggatggtatagatactcatgattatgaagaagcagctagaattgcaggattaaaaataggtgcatatgtaggtgaggcaggaagagaagttgagccagatgaagtcattgtatatgagacaaagccattattaaaacaagtaaaagaatatccagacctgccaacagtagcatatgttcacatgttacaatcacaaggacttttacatgacacttattactatggggtggatgctaaacagatagtgcctacatttatgtatccaactgaaataatggatggagctataatatctggaaactgtgtagcaccatgtgataaggttacaacattccatcatttaaataatccagttatacatgacttatataaaagacatggaaaagatttaaactttataggagttattttgactaatgagaacgtattcttagtcgataaagagagaagctctgatatggtagctaaattaatagaatttttaggagttgatggagttctagtgacagaagaaggttatgggaatccagatactgacctaatgatgaattgtagaaaatgtagtgaagttggagcaaatgtagttttgataacggatgaatttcctggaaaagatggcaagagtcaatctatagcagacgctactaaggaagcagatgcagttgtttcttgtggtcaaggaaatctagtggttcatttcccagcaatggaaaaaattataggaactttagattatgttgaaatgatgataggtgggtataaaggatgcttaaatgaagacggaagcatggatgcagagctacaaattataatagcatcaactatagcaaatggctataatcatttgacagcaagatattattaaataagtatttgaatataaagttctgttgatgtaatcgttggtctaattgatgtaataactataaagtgatttggaggattaagagatgagtaaaatcagagtggttcattatataaacaatttctttgctggtataggtggagaggaaaaagcagatattccgccagaaaaaagggctggtgtagtaggacctggaatagcatttcagagtcaatttaatgatgatgcagagataatctcaactgtaatttgtggagatacgtattttggtgaaaatattgagagtgcaactcaagaacttttaaaaatgataaaagaagaaagccccgatttatttattgcaggcccagcatttaatgcaggtagatatggagtagcttgtgggactatttgtaaggcagttgaagaagagttaaatattcctgtagttacaggaatgtataaagaaaatccaggtgtagatatgtttaaattagatttgcatatagtgtctacaggaaattcagcagcaagtcttagaaaggtagttccaataatgacgaaactaggtcttaaattggttagaggtgaggaaataggacctcctgaagaggaaggatatataatgagaggaataagaaaaaatttcttccatgaacttagagggtctgaaagagcaattgatatgttggttaaaaagatgaaaggggaaagctttgaaactgagtatccaatgcctgaatttgatagagttacacctatgaaacctgttaaagatttatctaagataaaacttgccctagtaacttctggagggatagttccaattgataatccagacaaaattgaatcttcaagtgctactaaatatggaatttacgatttaacagatatggattctatgtcaaataaagaatttacaactatacatggggggtatgacagagcatatgtccttgaaaatccaaatttagttgtaccattagatgtagttagagagcttgaaaaagaaggtgtaattggagaattagtagattattttataactactacaggaacaggaacgagtgttggcaattctaagagatttggagaagagttttctaagaaattgttagaagatgatgtagatgctgtaattttaacttctacatgaggtacttgtactcgttgtggagcaacgatggtaaaagagattgagagagctggtatagcagttgttcatatatgtacagtagtaccaatatcacttacaataggagctaatagaattgttccagcagtagggataccatatccacttggaaatcctatgttaggagaagaggaaagtaaaaaaattagaaagaatatagttttaaaagctttaaatgcactaacagaggatatagaagaacaaacagtatttgaataataaaaatataatatagaaataaaaaaagatatcataaaatagtttttgaaaattattttatgatatctttttgctatggatggaatgaagaaagcaattaagtaataaaaatatttatagtaaaacagccaattaaagtataaagaatgaaaaaaataaatagaagattatacataaacaaaaaaagagattttaaaatctctttttattatatattaattattttttaaatttatattttttgcatcagattttctaatagctaagtcaaaccctctaaatctaatcactatagggtcattaagaggagctatctttttcacttcaacttcagtgccatctattagtcctaaggctagaagtctcttcataagtttttcatttccagctatattgtctataattcccttttgtccaagttttaagttgtaaacagtcattattaacacctcctaatgaaaatcattatcaaactttatatttataatatataacaaaaagagtaaattgtcaatatataacaaaaaataaacatactaagttagtatgtttataaaaaatagtatacatgggatactaatagcatctagcaaaaaaccacttactaatggtacaaccaaaaaggcttttggagaatcaccatatttttgtgtcaaagaactcatatttgccaaagcgttcggagtagctcctattccatgtccaatcaaaccacttattatgatggcagaatcaaaatcttttccaagtactctaaagcaaataaatattgaaaataggattataaagattacttgaaaagttactattaagagaataggaggtaataatgtagataattcaaataaatctatattcataagtgataaagttaaaaaaattcccaatgaaagttcttttaaaaaatctataagtttaaaatttaattctaatatatttatcttatcatttaaatttctaaaaataacagctgaaaacatacaagttacaacagagggtaatagtatattaaacgttatatagaagcatctacttataatttctcctgtatttatacaaataaatatgagaagaacctgttccaaaaatacagatggtgttattgtttcggagaagttattattttttatcctattcttatttctaaaaaatttacttccaaatctctttagatttctattatatctaggaatcgacaagcctatatttgatgatggttttaatttatatttatttattagaaatttagctacaggacatcccaatataccacccataataagtcctattgttgcagcagataatccaaccccaactgctccttctataccgagattttctattgtaagtccaaatgcagcagaataaccatgaccaccttccatagatacatttccacacataagccctaaaagaggttcaagttttataatctttgatattgtaatagctaatatattttgacaaaatgccaatactccacacaaaatccaatatctaaataatacactaccacctttctttataagatttatgcttatttcaagtcctatagttgtaaaaaagaaggttataaaatttggcattaaatttccacttatagatatatctgctatattaaaatatttaaaaaataaatttagaaaacaaaataatagacctcctattactggtgcaggtatacagaaattatttaaaaagttaactttattcttcaataaattaccaattaaaaagaagaatatagatagtgtcaaggtttgcactatatcaaaacttaaggtaatcaaaataagtcctcctttgtaattcaaagttttaattatataacttaaattcttatgtattgaaattttattatcaaatgtatattaataaatgtatattaaaaagaatcagtatatataattagatagtcataaattaaattaaaatattttaatgagatgtgacttttttagaatgaaaaaccgtagtatattgatataatagaaataagacttaaaaatctgttgatagtattatttataagtacagtaggaggataaaatgtttgaaaatttacctaagatagatttacattgccacttagatggaagtgttagagtagaaaccatgcttgatatagctattaaagagaaaatagatttaccttcaaataatatggatgaaataaaaaaattagcaaaggtttcttttaattgtacttcactagatgaatatttagaaaaatttgatttacccttaaaagtaatgcaatctaaggaaaatttaaaaagaattacttttgaacttttggaagatgcaagtagagaaaatgtaaaatatattgaaattagatttgcaccattacttcacacccaaaaaggtatgagtgttaaaaatataattgagggtataattgaaggaattagagaagctgaaagtatttatgatataaaaggcaatttaatattaggttgtatgagaacaatgacctcaaaagaggcattattagtaattgaagaagggaaatcatttgtaaataaaggtgttgtagcagtagacttgtgtggtccagagaaagagggattttgtaaggaatataaagatgtttttaaattagcaagagaatatggatataaagttacaatacatgcaggagaagctgcaagtggagaaaatgtattggatgctataaatattttaaaggcggataggattggtcatggggtaaaaattaaagaccataaaaaggcgtataatttagttaaagataaaaaaatattgcttgaattatgtccaactagtaatgtacaaactaagacagtagattcttatgaggtacatccattttatactttttataaagataatttacatgtaagtataaatactgataatagaactgtatcagatataaatttaagttcagaactaaatgttatatttgatacttttaaactaggattagaagactataaaattatttatagaaatgcagtagaagctagttttgcagataaagaaactaaagagtatttgaatagtttaatttaatagataaaaatatttaaactttaaattaagctattaaattgacaaaaatacattgtattaggagaaaaaatgtgaaagattatgaagatgttgtttatattaaactagtcaaaaaagaacttgaagaatggaagaaaaatatattaaagaaaccttctatatttgacaaagcatcaaagggtatacagaataaatttaatggagtattgccagataaatatcatgaaataattacttcttctataaaagtaatgacaaaaaccgtactgtttggatataaatatgctacaaagccaccacttagaaatatgtcattagaagaaagagaaaaattagttttagaaaaagctaaaacttacaagaccacagcaatgattgaaggggcaggaacaggggcaggaggaatcctcttaggtttatctgattttcctttgcttttaggtattaaagtgaaatttttatatgatgtagcttcaatatatggatatgatgttaaagattatagagaaaggatttatatattaaacatattacagttggctttttctagtcaacagcatataaacaaaacttttaaattgatgaataactgggatgaatatgtaaatagtctaccagaagacatcaatgattttgattggagaacatttcaacaagagtatagagattatttagatttagctaagtttttacaactaatgcctggaataggagcatttgtaggattttatgtgaatggaaaattaattgataaattatgtgaaactgctgtgtctgcttatagattgaggattcgagagcttaagttataagagaaattataacataaaaaattagttatacaatatatctatatgtatctaattttgcattgataaaaacaattatggataaaaggtaaagcatgatagaatctaatgtagaggtttgtattttaatggaaaaatttagtttttattgcttaagatacaaattgaattacgaagagaagtaattgggaggaatattttcatgacaaatttgccaaaacaatttgatagcttcaatgaagctagacaaaagggatttataaatgcaaaggaacttaaggaaagtgggaaaaagatggttggagttttctgtacatttactccagttgaaattccaatggcagctggagcaactgtagtaggtgtatgcggtgttagtgaagagccaatacctgatgcagaaagggtgcttccaagaaatctttgtcctttaattaaatcaagctatggacatgcaataacagacacctgtccttatttctatttttctgatttgttgataggagaaaccacttgtgatggtaagaaaaaaatgtatgaagaacttgcaaaagttaagccaacatatgtaatgcatttgccaaatacttcaaaaggagaatttgcctataaactttggaaagatgaaatgataagattaaaagaagaggttgagaaatctttaggtgtaactataactgaagaagatataagaactgctataaaagataaaaatgaagaaagagaacttttaaaagagttttatgcacttggtaaattagaaccatctgcacttacaggccttgagttacataatgttttatatcaagcaggttttaaatttgaccgtgcagaacttaaacattctttaagaaaagttatagatgatatgaaagaaagatatgaaaaaggtgaatgtcctgttcaaaaagataagccaagaatattgataacaggttctcctattggtggaataagcgaaaaaatagttaaaactttagaagatgcaggggcatcagtcgttgcatatgaactttgtggagctattagatcaaacgatttattggttgatgaagaaatagaagatgtatatgatgctttaacacaaaaatatataaatataggttgttcttgtatgatgaataatgacaatcgtattgaattattagatagaataatagatgaatataatgtagatgctgtaatagatgtagttttacaagcatgtcatacatttaatatagaaagttatagaataagagaatttgttacaaaagaaaaaaataagccatttatgtctcttgaaactgattattcaaaatcagatactgaacaattaagaactagatttgaagcgtttgtagagatgttgtaggaataaataaaagtaggaggaactatgtttagtataggagttgactcagggtcagtggcaacaaagggtgtgctatttgatggtgaaaaaattattaagaaaataattataccaactggatggagccctaaaaatacatctaaacaggtctatgagttgctaagtagtgaaattgacaaaaaagatataaaaaaggtggtaggtacaggttatggaaggggagtaatggattttgctgataagaaagtaacagaaataacttgtcatactagaggtatttactttttaaacaagaacataaggactattttagatgtaggtggtcaagatagtaaagttataaatttagatagagatggaaatgtatttaactttataatgaatgataagtgtgctgcaggaactggtcgatttttagagattacttctaaccttttaggaagcgatattgaaagtatagatacattagctaaaggatatgaaccagttaatatatctagtatgtgtacagtttttgctgagtctgaaattgtaagtcttctagctcaaaacatttctactggagaggtagcagcagggatacttaaatctattgcaaataaatccacctcaatgttagcaagaggtgaggtaatagatgaagttgcatttactggagggcttgcaaaaagtaaagaactagtaaaaatgatagaagaaatactgggtaaaaaaatttttattgcagaagatactcaaataataggagctttaggagctgctgtaataggatttagataaaaacatataaaaagaaaatgaaaagctgaatttatcataaataagttcagttttttattttattttgtttatttataaaggaaaactttggtataattgatttaaatgattgtatatttgtaaatacttgatatttagtcatatataacattagaattttaaaaattagctcaaaataagggggagaaagcgtgaaaaaatttacttcaaaaaaagtagcaaggtttgttgcactgtttttaatatctattttagtaatgtcaacaattcctgtgtcagctgacaatagcaatacattgaatcagataaaaaaagcagaatacagtgatacttataaacaatatctaaatgatgctaaaaatggacgtacagaaaaatataatggaattataccaaatccatatcagttagaaggtactcaaattcaaagtaaaggaagaacagctccaacatcttatgaccctagaaaattaggtcttatgacatcagtaaaaaatcaagaggatttaggaatatgctgggattttgctgcaatggcaaccttggaaagtttcttgaagttaaataattatggagactacgatttatcagaagaacacttaagatggtgggcttcagatggtgaatatggatggtctgtaaatgatatggatggtgctttaaattatgaagctatgggatatttaacatcttggtcaggtcctaaattagaaaaagatatcccatacaatggtagagtatctaaagcacaaggagcaaaaaaaccaactaatatgaatacagcacctactgtttttaatgtgacagatgctgtgtgtgtaagtaatgacataaattctacaaaaaatgctatattacagtatggagcagtaacatctggttattatgaagatattaaatatcaaagtgatgaccaaaattcatattattgtccaacaaaaagttttaatacaaatcatgctatttcaattgtgggttgggatgataactattctaaagataattttaatgcaaatattagaccatcaaaaaatggtgcttggttaataaaaaatagctggggagattataattctgagggtggatatttctggatatcttatgaagacaagacacttatgtctgatatagataatttttcaatcaaaggtggtaaaaaaccaaatgatgatgagaagatgtatcaacatgactatgcaagtattgtacctttaatttcaaaaaagataacagctgcaaatgtatttgatttcaatagaggcgatgaaactctaaaatctgtaatgttcttaactgaaagtataggagctaagtatgaagtatcttatgctccagtagtaaatggtatacctcaagaaaacaatatgaaaaaattaaaagaaggtactgcccaatattcaggatacataacagttccaattgattcttttaatataccagaaggaaagggtgcaattgtagtcagtatagaggggaaaaatggagagtcaactataggttctgagtcaaatgtaccaggatatgatacatttaaagcaaaagctaatttaggtgaaagttatatcatagataatactggaaaattctttgatataaatagagatagtaacttctatccgtgtaattttactataaaagctgttacagaaaagtcttctggtgagagtatcccgaatgagtctttaattggtagtgatagatatgaaactgctatcaaagttagtcaaaatggtttcaattcttcagaaaatgtagttttagtaaatggcagttcaatagtagatgcattggcagcaactccttttacatctgctataaattcaccaatattattgacacaaaaagaagctttaaattcaaaaactaaagctgagatacagagattaggtgctaagaaagtatacctaataggcggagaaaattctataagtaaagaaattgaacaacaattaaaaagcttaaatatatcgatagagagaatatcaggaagtgatagatacaagacaagtttattattagctcaaaagttaaatggtataaaaaatgtatctcaaatagcagttgtaaatggagtgaaaggattagctgatgcaattagtgtaggtgctgctgcagcagaaaataacataccaatcatacttgcaaatgaaaagagcgaattgcaaggagctgatgaatttctaaattcattaaatatagagaaatcttatattattggaggaacagcatccctatcaaacaatctagaaagtaagttaaaaaatccaactagattatctggtagtagtagagacgaaactaattcaaagataatagataatttttataaaaaagatactttaaaaaatgcatttgtagttaaaaatggaatcaagaatcaaaatgatttaatagatggattggcagttggtcctttaggagcaaaaactgggtcaccagtaattttagttggtgataaattagctgatagccaaaaagaagttcttaaaaataagactttagaaaaagtaactcaagttggtggaggagcaaataaaaatgcatttaaagagttagtaaaattaaaaagtgctaaatagagtacttaagtattaacatatattagtgtgtattagtaacttatcttaataaaagctgaaaataattactttaaattattgataaataagataatcaatgattgtaaagttttgttttcagctttaaatttatgtagtataagtttaaaaacataaaaaagggttactatatatagaaatatagaaaatcttatattttatatataaataacccatatttaattaactttttatagtgttctaatagatattattgaacttaatggtaaatataatgtgtaagtttcatttaaagttggattagattcatctatatatcttgagcaaagtgtaattgataagctatctgcttctataatttcaccatatagaggacaactgctaaagtaagaatgtacttcaacatatttatttaagttttcttgaacataatcgtaaaaacggttttttgtagtagtagccataaaatcaactcctttattttttattaaagttgaaacttttaaaaagataaatatgagtacttctattagaaactaagttaaaaaataagcaaatagatatgaaaattagaataatatattatttatatcttaattataacactagataataaaaaatgctatataaaattcagaattttcgaaagtttttaagcttatttttaaatatactaataatactattgacattagatagaaaaagtattatattgactatataaattattttagtcaaactggaggaaaaagatgcctaaatcgtattctgataaagaaagagagtatataataaaaagacttaaagaagaagcaagattgtgtatggagcaatatggtattagaaaaactactgttgatgagcttgtaaaacgggtaaaaataccaaaaggaactttttatctattttttcaatcaaaagaattgctcttttttgaggtattgagagatatacatgactctatacaaaaagaaatcttatatgagataaatagagtagatgaaagtattacatgtgaacaattgacagatatatttatgaaattctataggatggttgatagtacttcaattttaaatctcatgataaatggagaatttgagatattggtgagaaagttaccagattctataattgaagaacactttagacatgatgactttgaaattggagagattatatcttgcataccaaatgcaaaaaataaagacatagaaagctttagtggagcatttagagtagtttttcttaccatgctatataagcgcgaggttggaagtaattgttttgaagatgctttaagattaatgataaacggattagttatacaacttatggaatagaatttaaattttgtttgctaataacttttattaaaaattattaacaaacaaaaaaattatattttattgaccatatagtcaaaatagtcaaaaatttgaaagggtgatattgaatgattaaagttgatgatttatcatttagttatacagatagaaattttttacaaaatattaactttgaagtagaaaaaggggaaatactaggatttttaggaccatcaggtgcaggaaaatctacattacaaaagattctaattggaatgataactaattatggaggaagtgtcattgtaaatggagtagagagtaaaagacactcaaataaattttatgaaaatataggagttgattttgaatttcctagtttatatgaaaagttgactgcaatagaaaatttaaaatattttgggtctctatattctaaaaaactactatctattgatgagttattaaaatcagtaggactagaaaatgaagcaaataaaagggtatctgagtattcaaaaggtatgaaatctcgattaaattttataaaagctttattacataatccagatattttatttttagatgaaccaacaagtggtcttgacccgtcaaatagcaaggttatgaaagatataattttatcagaaaaatctaaaggtaaaactattattttaacaactcataacatgttagatgcaacggagctttgtgacagagtagcgttcattgtaaatggtaaaatatctgctttagatacaccacataatcttattatgtcaaaaggagctattaaagttagatatacttactttgataatggagaaaaaacttctgaatgttttctgaacaatactgctaatgataaaaatttgaatatgcttattaagaaaaataaacttttatcaatacatagtagtgaaccaacattaaatgatatttttattgagataacagggaggaatttacaatgaggctaaaaaatcttattttaggagatataaagtttcaatttaagtatggtttttattttttatatctttttttaagtattatatatatttgtattatcaatgtatttccaacttttatgagagaaaaaatagctataattatgatttattctgacccagcagcaatgggattgttttttatgggagctattgtacttcttgagaaaagtcaaagggttttaaattccttagctgtatctccagtaaaagtatctgagtatattttatcaaaggtaatttcattaggagtaatatctagtattgtagctatgtttattgctattacattaaatttagataatattataatatcaactataggtacctttttttcttctattatattttctttgcttggattgatacttgcaagtaaagcatctagtttgaatcagtttattgttttaagtattcctattgagattatatgctttattccaccaatactcaatgtacttcttgacacaaaatcatatgcaaatttgtacccttttaatatatgtatttctcttattagtggagataaaaattttataatgattaatattttaatatcaattataataataatttattttataacttattattttatttgtagcagttggaaaaaggtaggtggagtaaaactatgataaagattataaatgcgtttaaacaagagtttgaacaaattaagagagatgctatgctttttatagtatgtgtttctccaatattatgtggagtatttataaaatttggaataccattaatacagaatatatcacttaacaagttttattatcaattaaatttagagccgtatttcttgatgtttgatttacttttagcttttattacaccttttatgttcttttttgcttctacaatggtcatattgggagaaattgatgacagcatttcaagatatttaatagtaactccgcttggtaaaactggttatcttatttcacgatttggaataccaggtaccttagcatttattattactatgattctacttatctttttttctctaactaaaatttctttcttgttaaacttatcaatttctttattagttttattacaaggagttattatatcaatactagtgatttctttatcatcaaataaactagaaggaatggtaattacgaaattctcaggtgtttttatgatgggtattttagcaccattttttattttaaataaagcacaatatattctgttcttcttaccaactttttggatatcgaaggcatttaaggaagataattatatctatatgtttatttcaattgttatatcattaatatggattttattattatttaaaaagtttagtaaaaaaatagttaaataagaaaatttaatatataaatgtaaggttgacttgacagtaatgttgaaaaatgttacatttaagatgtaaagttaaccttacatgaatggagcaaatatgaaaaataaaataaagatattaagagaaaaattaggattgacacaagaacaactaggaagattagttggaacatctagacaggctataaatgctatagaaactggtaaaaatgaaccttcaatatggttggcatatgatatttcaagaatttttaatgaaccaattgaaagtgtatttttatttgaagaaagtgaaagaaaatcaagagcacagataagtaggggagaatattatggctataagaaagataagaacatttgatgatgaaattttaagaaaaaagagtaagtatgtagaaaacgtagataataagataagagaaatattaaatgacatggcagagaccatgtacaatactccaaatggaggaggattagctgcatgccaagtaggagtattaaagcgattagttgttatagatttaggagaaggacttattaagcttgttaatcctgaaattattaaacaagaaggggaacaaattgttgttgaaggatgtttaagttttccagaagtatggggtaaattaaaaagaccaaaaaaagttacagtgcaagctctaaacgaatacggtgagaaaatagaaattaaaggttcaggttttatggcaaaatgtctttgtcatgagatagaccatttaaatggtatagtttttacagataaaattattgaacatgtaaaattgtaagatagattggttattgaatttataaaatattttatagtaaggagttaaattatgagattatggcataaggatttaattgatgtattacctaaaaatcaattagtaagtcaatggagagagctacttgctataaaaggttctatagataaaaaaggtactccaaaccatctattagtgaataaagtattgaattatagtatagatgaatttaaattttatacaaaaattgtacatgatgaaatgttaaaaagaaattataaacctaatgaacttaaatatacaagtatattaaaatggaaaaatagaaattttgcaaatgatatatctaatgaacatagtttaaatttagaaaatttatatgatgattggcataataaaatgtatttaaagcaatgcttatataatttagaagaaaaagcaacatgtggaggaataccaataaatgaatggaatatattactttgtaaatatagtaaagattatgaattgtggtctggaaatatcatgttttaattactatagattaacattatagtattattgtatataaagaggtgattatttgtataataaaataaaatatattccaataaattgtgaaatagcttgtaataaattaaaaaggagtatgccatataaatgggatttaaatatttatcgtggatgtgagcatggatgtaaatattgttatgctatttactctcataagtacattaactccaataattattttgaagagatttatgtaaaaacaaatatagtagaaaaacttgagagacaacttaaaagcagtaaatggaagaaagaagtaatcaatataggaggagttacagatagttatcaaccaatagaagctgactataaaattatgccagaaatattaaacctgctgataaaatacaagacaccagctattatttctacaaagtcagatttaattttaagagattacgatttaattgataagctatctaggattacatatatcaatgtagcatctacaattaccacagtaaatgaagatacacaaaggcttattgagccaaatggtgtggattcaatgagacgatttaaaatgttaaaagaatttagaaaaactaacgcatcagttggtctacatattatgccaattataccatatattacagatgattttgataatataaattcgctatttagacatgcaaaagaatgtaatgtacattatgttttacctgggactttatacttaaggggtataactagaggtgttttttttgactttgttaaaaaagagtttcctgaattatttgataaattatcaatactatatagtgcaggttcacttaatagggagtataaaaatcaattgtataaaatggttaatgaacttagatataaatattctctatcaagcagttactctaaaataatgaaggaaaagttaaaaaactcaggagatggacagatatctttttttgattagttttatataaaaaatttttttttactatgatgattaaaatttattaaaattaaaatttattgacaaatataaaatttaaatatataattgattcataaaataaaaatatgaaaggatgatgttgttcggtgatatttgatatcataaaatcgttgatataagtattgctggaaaagagtgaataaaatcaaatttaataagcaaacaaagtaaagctatagttttattgttgtgcttaaaaatatttggttctattttactcttatttaaactcatctttttgaagttaaaccacagagtaaactctgtggtttttttattttaaaaataaattttaaggagtggtatgttttgttaaacaaattatgtatgtatttagaaagaccagagctttataaacaaagtgaaattaatttttgggatgatgagtatatttcaaaacaattattaaaagcacatttagacactaattttgaaggagcaagtagaaattttaactttatcgaggattctgtaaattggatagttacagttgcaaatccagttaattatcctaatttacttgatttaggttgtggtccaggtttatatgcagagaaatttgcacaaaaaggttataaggtaactggaattgatttctcaaaacgttctattaactatgcacaaaatagaaataaggagactaatttaaacataaattacttgtttcaaagttatttaaatatgaactataatgatgaatttgatttggctactttaatttattgtgattatggagctttgtcaactgaaaatagaaggttattaatggaaaaaatttatgatagtttaaaacctggaggaaaattaatattagatgtatttacaataaataaatacaataattttgaggaaattaaatattgggaaataaatgaagatggaggattttggagtaatgaaaaatatatgtgtctacaagataattgtaaatacaatgattataatacattagaacaaactcttgtaataaccgaaaaagatgaaaatgtattttatgtttggaatcactatttttcaaaagaaagtttcttattagaagttgaaaatattggatttaagtctgttgagttttttagtaatgttaagggtgaagcatattctgacgatagtatgactatgggattagttttacaaaaataataatttttttaaaatgaataaataaaaacttgaaacctttaacaataaaataacataagaaaagcttacatattgaaaaatggaaacttttatgttatttttagtacattacaaattttcttatataaaaatcaatacttgaattattatttttatgtgaaatttatctatagtatatttttataaacaagtaatgttattaaaattaagtatatagttaaaagtgtatagcaaaaaggctgttatattaatgttagaggttcagggaaaatatataaagcaaagatatttacagataatgtagattgcacagctataagttagataatagaattatgtaatcaagaatttacaacaaagtataagataaggataatgctaaattgccatacaggtgctagatgtgtaaatggatttaattaatactattgataaagtgcaacaagcacataaaccaattgatgagattattaaaactataagagatatagttgacataattaaaatattggaacctatttataattttaaatcaaatcaataatgattaagattaaaataatattaaggtatcaatgttataagagtacaatataaggagtactatatagtactccttacttatacatattaggcaataggaaatcttttcatagttaaattttcaaatattttttagggaactttataattgagaattaagggtatagtatgtgatgaacttactaaatttataattaggttatataatggaataatcatcaatagttttactttagggaaaatatatgcttaaggaagtatagcttactaatattattaaaatgtatatttaaaatgataaaaaaagaattagacaagtatttagtaaattgattatgtaaaattctatcaagcaggaaccctatgactttagtcatgggaggttcagtaggtaacttgttgaattaagtttatattatttaaataaactacttaatttagataatataaaaagtcagaattttaagaatagagctatataatcttagctattaggagaagtactatgataggaatatattttagtggaacaggaaattcaagatactgtgtagaaaaatttttacaagaatatgatataacagcaaattcttattctattgaagataatgaacttttacagcacatcaataatcatgagaatattatttttagttatcctgtgcaatatagtaatgtgccaaaaatattgaaagattttataataaatcattcaactttgtggaatggtaaacgtgtttttattattgcaactatggctctatttagtggagatggctctggtgtgttagctagaatattaaaaaaatacggtgctataactgttggtggattacatgtgaagatgccagatagtataggagatgaaaaggtattaaaacattctttagagtataataaaaagcttgtaataaaagcagaaaagaaagtaactaaagctgctaaaaaactgaaacatgggtcaccaccaaaagaagggttaggttttttgagtcatattgtagggttatttggacaacgattgtattttatcaataaaacaaatatgtatacagataaactaaaaattaatactgaggaatgtattgtatgtggtaaatgtgttaatttatgtccaatgaagaatctagtaattaaaaattgtatgattgttgcaaatgggcaatgtacaatgtgttatcgttgtgtaaataattgtgcaaaaaaagcaattacattgttaggtaaaaaagttgttgagcagagcaatattaaaaaatatatgtaagaaatttaaagttttattgaatgtaaattgatgtatattttatgttggaaagagaggtcaaataatggaatactacatagttgattcatttgcaactaaactatttaaaggaaatcctgctggagtttgtgttcttgacagaataatacctttagagttaatgcagaaaatagcagaagaaaacaatttaccagaaacagcatttgtagttaaaggtaaaggaaattatgaattacgatggtttactcctaaagcagaaattgatttatgtggtcatgcaactttagcagcagcttatgtaatatcaaattttattgatgttaatgtaaaaaggatagatttctttactcaaagtggaaagcttgaagttacacgaaatggaaatctatatgaaatgatatttccagaaataatgcctattgaaatagagttatcaccataacaagctaatttgataggctgtgtaccaagtgctgtctattcttcaagagatttaatcttattgctaaacagtgaacaagaagttataaattataaacctaattacgcacaattgcgtaaattgacagactggttaggtataataatcacaccacaaggaagtaatacagattttgtatcaagatatttttgtccagaattagattcagaagaccctgttactggttcatcacattgtaattttattccatactggtctgaaaagttgggaaaacacaaaatggtagctgctcaactttctaatcgtggtggtataattcagtgtgaagtgttgaaggataatactgtaaaaatttctggtgaagcagtcttgtttatgcagggaacaataaagattgatatttaaataagtataataactaatttattatgaaaaataattaattttcttagtgttaacaataataaagtagagttaaaaagcttgatttcacttaaatcaatatgatagatgttgatactaagattgacaagcatgattaaaaaagataatatttaatctataaagataaaaacacagtctggttggtagtccagacgcagcaatagctgtcagtaacctgcctccttggttgtccgttctttagaaagtaatttaaggaggaactagcgatggacaaaattagtggaaaattaacagtcttatttgaagaaccattttgggtaggtatatttgaaagacaagatggtaaaaaatatgaagcatgtagggtagtttttggagcagaacctaaagaagtagaagtgtatgaatttatacttgaaagatttttctcattagattttggtagcattaaattagaaaaaaatgtgaccaaagacaacattggatacaaaagaatgcagagaaaagtaaaaaaggaacaagaaaaagaaactatagggactaaggctcaaaatgctcttaagcttcaatatgaagaaagaaaacaggatagaaaaaacctagctaaaaatagaaaagaagaagaaaaagaaagaatatttaatttgaaacaagaaaagagaaaagctaaacataagggtcattaattttaattaaatatctttttaataattgctagaaaaaggtgtataaagtttttaattttatacaccttaatttattgaaaagaataaggttttatatttcaattactttaaaatataaaaatatactaataaaaattgtaaaaatagtataaatggtataccaaatgtaaatttaatgtgtttagttttatgtctaaaagaatacattccaatcatagaacctatactacctccaattactgctatagacataagagtagcttcttttattctccattcgtttctaattgctcttttcttatctatgtacattgaaaagaaagcaatagaattaatcactataaaatatattagaataaaatttttcacagtcttgcctccataaaaatatattatacattataaaacaagatatttgttttggaaagttaaatttgtaattagtacatataaaatatctgataagaataaatataatattaattggaaaatttaaaaaaattaaacaattagcaaatagggggtatatttataagacacaaagtgataaaatctatttagaaaataatgtaaaataacaggaggataaagcaaaatgaaatttatagtagaaaaagaagtttttgataaattagaaaatgtatgctttggtgtagtagttgcaaaaggaatagataatactaaagaaatagaaagaataagcaaccttttagatataagtatagatagagtagaagattacttcaaagataaaaaagtaaaggaatcagaagaaattataccatatagagaggcatttagaagtctaggcatgaacccaaataaatttatgagttcgatagaagcaatgacaacaagggttgctaagaataagaaacttcctcatataaatcctattgtagatttaggaaactctatttctttaaaatatttacttccaatgggtgctcatgatatggattttagaaatgatgatgtatatgttagattttctaaaaaaggggataaatttgtaccatttggagaaactgatgttgaattaatggaagaaggagaattaatttattcagttggagacatggtaaaaactagaagatggatatggagacaaggagaggaaggaaaaattactaatagctcaaaaaatatattttttcctatagatggttttactgatgctaatttagataaggtaatgagtgcaagagaagaattagcaaaattgttaaaggaaatatttaattgtgaaatcaaagtaggttttgtagataaagataatcctgaaatggaaatataataagttgttgaatacttgttaagatattatatttacttaatgatgttaaaaaggtattaaaaaagaaaggtcgtagtaaatttgaaaaaaactataataaagaatgtaaatccaatgattgaaaataagtttataggactttttgaaatagagtataaaaacaaattagatgaagataaggtttggatggtagcatcaagaaaaagtagtgagcaattaaaaaatatttatttgaagaatgaagaagatagtgtagatgcagttgtaatagttgggcttcataaaagtagtaaaaaattaattttaataagacaatttagagtacctattaatggatatatatacgagttaccagcaggtcttgttgatgaaggagagtctatagatatttctgttgaaagagaacttagagaagaaacaggacttactcttttagaaattaaaaaaaataaaagtattgataaagtttatttatctcctggaatgagtgatgaatctgttgcctttgtttattgtatatgtgatggtgatataacagatgaatttttagaaccagatgaagagattgaagcgcttttaatttcgcaagaagatgcaaaagagattttacaaagtaatcataagatagacacaaaagcatttttgattttacaaatgtttgtgagtttaggagctaaattatttgaatagatatatagaaaagaggttatatagaagagtaaaataataaagtttattttacttgtataaattataatctctttttttatacaataaagtataattttgtgtatttttaaataagttacttgactcttaaattttcataatatgttataaaccaatttaagatactacaataattaaaattccaaaattatttagcatatttgcaattaaaatgagaaaaggtaaaggctgaatgattgaaaaatttgatgtaaaatagtagattagtttaatattatagtttgtagggttaaaaattagaaattgtaaaggagataaattctatgaaaaaattagttattattttaattagtatcattagtgtggttagcttgacagcttgtaaaaaaagcaatgaaagtaaatataataatttaaacaacaaagaatcaggacaaacaaccattgaaatggacttagataaaaattatgatacttcagacccatttgttaatgcacgtttgttttgtgtgtctaatgatatagatgttttagacacagagatttcttttaaaatggatggagatagtggtattgtggaaataaaggacaataaaacagatgaaactttatggagtaatacatggcatggaagcgttgataatgatacattcgcaatttctctttctaatatacaaaaagagaaagagtatgctatatgctttaccggaattaaaataaatcatgcagttgtaaaggttacttttgaaagcaatttagttaaggagaaagaaaaaccctcaaaataaattccagcttgtctataacttgatattcagtacataaaagcagttgatatttatgattgactgctttttcctatcaaaaaggataggttgtgcatttttacttgaaatagtttatgcacatcaaaagttggtgagcatgatattggaaatggtaagcatgaaatcttgataacacaaggaaataaatttaagttttcaattaagtatatttccataatttagttaacaataagctaattattatttatattttgatatataaataataattgtggcaaattttaaaaaatcatatattttttgaactaaataaaaatttgtttttattattttaaattagaggagattcttgaagatatattatttttaaaaataagtatagtttaaaaattcaaaaaaaagatggcaaaatatgtcccaagggacattgagtaaaataaatgatttcagcttatttacactaaaaagtacatactaaatgaggggtgaaataaagaaaaatgatatactaattgtcttttgataataaaaaaacatggaatttgattatttaatcaagaaaaagtattgaacaaatgatttatttagtgtacaataatcatgtaaaaacatagtaatggagggagacatttcataatgaaaattaaggtaggaatgaacggatttggaagaataggaagagctgtattaagaatagctcaagaagaattaggagataatatagaaattgtagccataaatgcaagagcaacaacagaatctttggcacatttatttacatatgattcatgctatggaacttttagaggtgaagtagaggcaaaggatgaagacactctagtagtaaactctaaagagataaaaatattaagatatagtgacccagaagaattaccatggaaagaactgggggttgatatagtaatagaatcaacaggattatttacacaaagagaaaaggcagaaaaacatattaaagcaggagcaaaaaaagtaattataacagctccaggaaaaaatgaagatataactatagttatcggagttaatgagaaagaatatgataatcaaaagcacaatataatttcaaatgcatcttgtactacaaattgtctagctccttttgctaaagtattggacgaaaaatttggtatagtaaaagggttaatgactacagtacattcatatactaacgatcaaagaatattagataaaagccataaagatttgagaagagcaagagcagcggctgaatctataatacctaccactacaggagcagcaaaagctgtgtcaagagtactaccacaattagaaggaaaattaaatggtttttcacttagagtaccaacaccaacagtttcacttgttgatttagtgtgcgaacttaaagaaaacgttacatctgagcaagttaactctgtgttaaaagatgctgctgaaggagaattaaaaggtgttttaggatattgtgacaagccacttgtttctatagattataaaggagattcaagatcatctattatagacgctctatccacaatggttatagaagacaatatggttaaggtagtttcttggtatgataatgaatggggatattcttcaagaactgttgacttagtaaaatatgtagctgaaaaattaaaataatatatatttcttaaagcaaattttaaaaaaattttttgaaaaaattatataaaactaaaaaaaaagattatgaaaaatattgaaggaaaaattttttcataatcttttttctttcatgcaaaaagatacaagttacaacttatatttgcatattaggtcgttagagaagtatatatatatttagtaaggaatcatactttttataaaatgaaagataagatgtcgaaaacttgcataaatctgaaaaatttttattattaaaatactgattttcattttaaaaatgataaaaaaatgacaaataaagttgcaaatagtaatacttataagtataattaaaaaagagaaaaggttttgttaaactttataacaaaaaaagaagggatgattcaaaatggagaagttaacagacaggagacaggttaaggcagtaagcatggaaaccttcattttcctaatattactagtagttggttttgggtatgttggtagtattatgggagcaggaatgatgttcaaagtaataatgagtacagcacatgctttactattggagacagttttcttaattatggctatggcagttcttgcaggcgcattaagcgcactactttcagagtttggagtaatagcgttaattaataaaattttcgctgtatttatgaagcctttatatggactacctggtgctagtatagcaggagctataacaacttatttatcagataatccagctattataccttttgctaaagataaaacattcacacagtattttaaacaataccaagttccagcattatgtaacttaggaacagcctttggtatgggacttatcttaacaacatttatgatttctcaaggtacagaatatgtacttccagcattaattggtaatttaggtgcaattataggtagcgtcataagtgttagaataatgttgacatttactaagaagttttataaatacaatccggaagaagataaagcaacaggaacattagagaaaaaggatgaatttagagaaatcagagaaggaaatgtatttcaaagagctttagatgcaattcttgaaggtggtaaaatgggggtagatatgggaatggctataattcctggagtcctagtagtatgtacattggtgatgttattaacttttggaccatctacagaccctgttacaggtcaagaagtttatacaggagctgcatatgaaggaataaaattacttccagttattggagataaacttggatttatattagaaccattatttggatttacatcaccagaggcaatagcattccctataacttcattgggagctgttggtgcagcaatgtctctagttccagagtttataaagtcaggagctataactcctaatgatatagcagtatttacagctatgggtatgtgttggagtggatatttaagtacacatattggtatgatggatgcattaaatgctagacagttggcaggtaaagctattctttctcatacaataggtggtttatgtgcaggagcagcagctcactttatatttacactcgtaggataaacgtaatcagctaagataaaaaataatatacaaaaaaatggttgttgatatgtaataagaatttacatatcaacaaccatttttttctgactaaagataatttataatacataaacattaagtggatattagacttaagttatatttatgtaaaaagtaacaaaaatctgtagaaatttatgacaaaatttagtacactaactatatgttcttatttaaaatttaaggttagaattaggaattacctagtagagtaagctttgattaataaaagaatcataaaataaaaatattagtcataaagattataaataacttacttaaaataaagccatagaacttacaaaaattaaaaaagcatataaatatggaggggtacaatggatgaattatttcatataggaattgatgtaggttctacaacggtgaaggttgtggtacttaataatagtaataatatagttcataaagaatatagaagacattattctgatgtaaaaaaatcagttaaagaagtactaaatggtatatatgaaaaattgggagatataaatactaccattataataactggttcaggtggaattggaatatcaaaaaaattaggtgtaaaatttgttcaggaagttatatctagtacaaaatcaatagagtattttcatcctgaaactgatgttgtcatagaacttgggggtgaagatgcaaagataacatatctaagtggaggaatagaccaaagaatgaatggaatatgtgcaggtggcactggagcattcatagaccaaatggcatcacttttaaagacagatgccagtggattaaatgaacttgctaaagggtataatgttatatatcctatagcttcaagatgtggtgtttttgctaaaacagatattcaacctcttataaatgatggagccaatcagactgatatagcaatgagtattttcaatgcagttgtcgtacaaactgtgagtgtcctttcttgtggaagaaaaatagaaggaaatgttgcgtttttgggtggtccattgtactttttatctgaacttagagaagcatttaaaagagtattggatttaaaagatgaaaacataatcttcccagaaaatgcacaactttatattgctattggagcaggattattatcagtagatgaagataatatacaactaaaatctctaatagaaaaattggatagtataaagaatattgaagatggagaagtaaatttattagaacctttatttaaagataaaaatgagtatgaagaattttcaagaagacatgaaaaagaaaaaataagttatgtggacataaattcaataaaaagcaattgttatttaggaattgatgcaggctcaactacaactaaagcagcacttattgatgaggatggaagacttgtatattcttattataatagcaatgaaggaaatccattaaaaacaaccattaaagttataaatgaagtatatgatatattaccaaaaaatattaaaatattgagttcaactgtaactggatatggagaaggtcttattaaaaaagctcttaaaatcgataacggagagatagagactatagcacattacaaagctgctaaatttttcaataaagatgtagattttatacttgatattggtggtcaagatatgaagtgcctaaaaataaaagatggagtaattgataatataatattaaatgaggcttgttcatcaggttgtggctcatttttagagacatttgcaagttctttatctatgacaatagaagaatttgcacatgaaggtatttattctcaaaatcctgtagatttaggttcaagatgtactgtatttatgaattctagagtaaaacaagctcaaaaagaaggtgcaagtgttggagatatatcagcagggctatcttattcagtaataaaaaatgctttatttaaagtaataaagattagagatttaaatgagattggtaataatattgttgtacaaggtggaaccttttataatgatttggtgcttagaagctttgaaaaactaattggaaaaaatgtaattagacctaatatttcaggaattatgggagcttttggttcagcacttatagctaaagaaaaatatgaaagtggatacaaaacatccttgttatctaaggaagagttgaataatatcaagctagaagcaagtgtaactagatgtaaaggttgttcaaatcattgtcttcttacaataaataaattttctgataatgaaatttttatttcaggtaatagatgtgagaagggtgaagctatttatggtgataaaaaaataggattagaaaagaaaaaaccaataaatttatttaagtacaaatacaatagaatttttagatacaaaccattggaaaaagaagaagcaaaaaatggggaaatagggataccaagagtattaaatatgtatgaagattatccattttggtttacttttttcaatgctatgggctttagagttgtactttcagataggtcatcaaaacagttatatgaaactggtataactagtattgcatctgaaacagtttgttatccaggaaaattagttcatggacatatagaaaatttaattgcaaaaggtataaaaaatatattttatccaagtgtaacaaatgaaaataaagaggattcaaatgcagataattattataattgtcctgttgtaatatcatattctgaagtaataaaaaacaatgtagagaatataagaaataagaacataaattatataaatccatttataagtctaaatgataaggaaaaattgaagaaaagactatatgatgaattatcaagacatttttctgatataaaaataactaaagaagaagttaatcatgcagttgataaagctactgatgaacagaatttatttaaaatggagatacaagcagcaggtgaaagagcacttaaagaaataaaagaaagaaatatgaaggggattgtgttatgtggaagaccatatcatatagacccagaaataaatcatggaatgccagagcttataaattcattagatatggcagtgcttactgaagactctatatgtcatttagccaatgtacaaagaccacttagagttgtagaccaatgggtatatcattcaagattgtataaagcagctagttttgtaagagataaaaactatttggaacttgttcaacttaattcatttggctgtggattagatgcagtaactacagaccaggttcaagaaatacttaatgaaaaatcgaagatatatactattataaagattgacgaaggcaacaatttaggagcagctaagataaggatgaggtccttaaaagcagctatgtttgagagagaaagcaaaaatatagatgtaaaaaatataaaggtaaacaggatacagtatgctaaaaataatcagataacgaacaaacatactatattagcaccacaaatgtctccaatacatttccaattccttgaaaaagctgttaacttaagtggttataatatagaaattctaaaagatactgatagtagtgtaattgaagaagggttaagatatgtaaataatgatgcatgttatccagctataatagttgtaggtcagctaataacagcattaaaatctggcaaatatgatttaaataatacttctgttactataactcagactggtggaggttgtagagctacaaattatattggattcttaagaaaggctatatatgatgctggatttaaagatgttcctgtcattgcacttagtgtaaatggaatagaagatagtggtataatggataatatatcactaaaattaatcaatagactctttatgtctgttgtttatggtgatttgctgatgaaagtactatatagagtaagaccatatgaaaaagttactggaagtgcaaatgctctatatgaaaaatgggttgatatatgcaaatcttctcttgttaaagcaaaaatttctgtatttactagaaatataaaagatatagtaaaagaatttgataatttagagatactagatatcaaaaaaccaaaagtaggtttggttggagaaatattggtgaaattccatccaattgcaaataataatttagtagatatattagagcgagaaggtgctgaagcagtcgtgccagaccttacaaatttcttcttaagttgtgcctttaatactatatacaaacacactcatttagaaggaagtagaaagagtagaatgataggagaagcatttatatacataactggaatatatcaaagagtatataaaaaagcacttgataagagtgagagattttatgctccagccaatataaaaaatgttgctaaaagtacagaaccagtagtgtcattaggtaatcaaactggagaaggttggcttttaacaggtgagatggttgaattattaaatgaaggtgtagaaaacattatttgtatgcaaccttttggatgtttacctaatcacataattggtaagggttctataaaagaattaaagaggttgtataaaaatgcaaatataatacctattgattatgacccttctgcaagtgaggtaaatcaacttaacaggataaaacttatgctttctaaggcttttaaaaatatataagatttatattttgatatgttaaaagttaatgaatttaaaaatatactctatattaagtatctataaaaaagagttatcctattttttagggtaactctttattagttaaaaaattatatgtatactgatattaaaggggggaagtaatatgagtttagtatatgatgtttataaatcaaaattaggaaatttgtacatattaagtgaagatggttttatagttagtgtatacataggagatgaaaaatttaataatttaaaaaatgaatgtattaaaaaaggaattgatataaagataagtaaggaagatttaaaggaagcaataagccagatagatgattactttaatggaaaaagaaaagtctttaatttaaatattcgtattgaagggactgaatttcaaaaatcagtttatagggaaatgttaaaaataccttatggagaaacattgtgttattcagatatagcaagaaatataaacaatccaaaatcagtaagagcaataggacaagcaagtaaaagtaataaaattccaataataataccttgtcatagagtagttggcaaaaaaaatattggtggatatatggggaatcattctgatttgaaagagatactattaaatttagaaagacagagttaacttagaaagaaatgtttttattgttaatatttgatataataatagtaaaaagaagtattttttacaaaaacaatgaagaatttattttaatttacaaaaatgagggggaattttaatgtgtgataaagttatagcatcaaaatatcatgagaagggatttaattgtgcagaatcagttataaaagcatataatgaggaatttaatacagatataccagtttgtttaggaagtggactgggttcagggtgtggggttgctagtttatgtggtgcagtaaatgcatcaaatataataattggatacgtaaaaggcagaaaccacgaagatgaaagtactaaagctaaagtatatgctaaagatttaactacaacagtaagaaaagagtatggttcagagttatgtatagacctaaaaaaagatttagttgcttgtagagaaataatggatttcgcatatgatagtctaaaggaaactttaaaaaaagaattataagaaaataagctatcaagtataaattatttgatagcttatttttatagtcgatactaaataaatcaaatatattttagaattattatttgtaaataaacagcaaataattttaggatttttatttaatatagtttttatttatatttatttttgaatatgttatactttgtttaaataaatatttgtaatgagggagatgagaagattgaagaatctcaatttacttattaataaattatattcaaaaaatcataatgaagcatataaaacttttttattcttagaaaatgaaagtttaaaatcaaatattacatattgtttttttgactcattcctagaaatgattgataacgaaaactcatatattcgaacaaggggattgttattaatctctgcaaatgctcagtgggatattgataataaaattgaaataaatatagatagtatactaagtcatatcgtagataaaaaaccttctgtatcaagaatgtttattaaatccatacctaatattacaaagtataaagaaaatcttattaatcgcataaaaatggaattaagtaatgcagatataagtatttataataataatatgaaaccattagtagaaaaggatataaacgatacattatctaatattagttaaatattaatatagaaattgaatattatctagttacaattatttataactaagataataaaacaacaatggtgctaatttatatgtataaattaattatgaaaaatttatataagtaaaatatattaacataaaggtaaaattttgtatactaaaagggaatatttacagtttaatggcagttttaaaataataaattaaagctgtcatttttatttaaaaatttttagaaaaagtacaatagtgttaatgtgtgaattagataaggtgtatataataatttagatgatatgatataaaatatgttgtaaattaaatgttttctttgacaatatatacacaaggatgataatatctatatgaataaaagatagtgtgtaatttgataatatgtaattataacattatgatataattacaataaagtatgtaataatctgtagaaatttcaagctagttatctaagttttcggataactaaatctaaacggaatacataatgtattaaataaatgatgatactaaaatgatactatttttatagaaatttattgaggtatataattgatgaaaataatatattaaattatataatatattgagttttacataaaagcgaaggtgggaataaaaatgaaagaaattgctgatgctataacatcagagtatttaagctatggtatcaatgaagatattagtatctatgaaggtagattttgcatatatttagataaaaaatatagatgtaatgggaaaatttattataaaatgacacctccaatatctataagttttaaagcagacataggttgtgttgaagagatagacaatgaagatgacaatttagttttggattatgataatgctattcttgaagttcatggatacaaaattatttctataacaataaatactttaagtgaatttagtgtagaaggttatatcaatgatgactgcataaaatctaagaactcctatgttgaatatgtagattttaatataataaacttagataaaatacctggaaaactaattaaatacaatgataaggtatacgcaggtagaattgaatttgatataaatgattatgttgtaactatagacaagcgatatgattatagaaaagaattaaaatcagaattaaagtctaaatctggagcaataataactcatataggtaggattagaagaaaagatggtagaatttttagaacaaataatacaataaatcttttagatagaatatcaacagctttgagttttatgtgtggaagatatgtagggttttgtttggccaaagggtatagaagtggtaatgaagtttatagaatatggaatgaaaatcaaatatctccttttagatatgtaccaacatggtcagatacactttcaaattatcataatatggaaaaatatataagccttatgtgtaaaaagctagaagatttttattatggttctgctataaagagtgttgttgattggtacatagaatctcttggaagtgctaccatggaaaacaatataatatctgtacaaattgcacttgaaactttgtcatatgtaattctagtggaacaaagtaagatacttacagatgaagcatttgactgtaatttggcatctaaaaatataagactcttacttgatacatgtaagataccatatggtaaacatgaattaaatatatttgataatataataaaaaataaatttgatgatggagtggatttagttatttatttaagaaatagcatagttcatccaagtagaaagactcatagagctgtgttagaggttgaagatatttggaatataatttcaataggaacgagatatattgaacttgttttactctttattttaggttatagaggagaatattcaaacagattagtagaaaggtgttatggtgaagtggaagttgtaccttggaactagatttttatatttattttaaaatatatattgacatatattgccttatgctataaaatcaatatcataataataattcagaataacattaaatgctaagaaaagaaatagtaaaggtagttaatcttaaacagagagtttccgattggtgagaggagcaatagattttactttgaacacatctttgagcaggactctgaaagagtagaaatactttattaggagatttccggaatccttgcacccgttatagtgctagagtataataattttattgtacttaaagaggttagtgtcgtgaggcattaatgaacagaggtggaaccacgagagttaactcccgtcctctagcagaagctagaggcgggagttttttaatataattttttaagcgcgcagagaattatattgcaatagatacactttttaaaaaataatcaaaatattttaaaaattaaaaggcgagggagaatattatgaaaaatatattaaaaaaagtaggaatatttacaattatgttaggtttattaggtggagttgtaggttgttcaaaaccagataatgaaaaagataaggatgcttcaaaggaatctaaaaaagaagtagttgtagggtttgataatacgtttgtaccaatgggatttttagatgaaaagggagatacagtaggatttgacgtagacttagctaaagaaacatttaaaagacttggaatggaagttaagtttcagcctatagattggtcaatgaaggaaactgaattaaatgattcaaaaactgtagatgtattatggaatggatattctataacagacgaaagaaagaaaatagtatcatatacagaaccatatttacaaaataaacagataatagttactctaagtgattcaaaaataaattcaaaagctgatttaaaagataaagaagttggaacacaacaaggttcaacagcacttgatgcagtggaaaaggataaagattttatgaatagcttaaaaggtggagcaccagttctttatgatacttatgataaagcacttagagatttagagataggtagaactagtgcagttgttggtgatgaagttttaattagatattatatgggacaaaagggtgaagacaaatacaaggtattaaaagacgattttggattagaagattatgttgtagcaacttctaaagaaaatccagaactttgtgagaaaataaataaaacattaaaagaaatgaaaaaagatggaacttttgacaaaatttatgataagtggtttaaatagaagataagttagctgttaagaagggggcactaaaggcatgttacaaggtttagagatagttatagcaatgttttgtataacattgatagtatcaattccattggggattggagttgcatttttaagattatcaaagaataaattagtaagtggtattacacaatgttatatattgataatgagaggtacacctttacttttgcaaatgatagtcatattttacggattacctcttttaggaattgtatttgacagatttacagctggagtagtagctttcttcttaaattatgcagcatattttgcagaaatatttagaggtggaatacagtcaatcgatagaggacaatatgaagcttcaaaagtactaggatttgataaatttactatgtataagagagtaatctttccacaagtttttaaaagaatactagcacctatttcaaatgaagtaatcacattagtaaaagatacatctttagtatatatattaggattaaatgatattttaagaatatctcaaatagcaatgaacagggaagcaagtctgttaccattatttgaggcaggagcgatatatcttatatttgtagctatacttactaagggatttgaattacttgaaaaaaaatattcttattatagataaagttacaatattataggaggaggttttttatatgttgaaaatcaaaaacttaaataaatcatttaaaaaaaatagagtacttaaagatatttcttttgagttagaagaaggtcagattggagttttacttggtaagtctggtgcaggaaagaccacaatattaagatgtataaatggtcttgaagaatttgatagtggagagattataatagataatgaggtaataaaaaataagagagatatggcaaaaatacgaggaaaaataggtatggtttttcaaaatttcaacttatttcctcatatgacagtccttgaaaatataattgaatccccagttaatgtttttaaagttcctagaaaagaggctgaagagagggctagagaacttttaagattagttgatttagaagataaattaaattcttatccatttgaattgtcaggaggacagcaacagagagttgctatagctaggtcatgtgcattgatgccaaaagtcctttgttttgatgaacctacttctgcacttgatattgatactattcaaagagtagtcaatataatgaatagacttaaagacaaaggtatgacaatattaataattacacatgatgttgtcttctcaaataatgttgcagataaaattataagtataaaagatggtatagtagaaaatgttcaaataaaagaaaaaattgtttagagttttataaatataaactagggtagaattttataatataaataaagggcaagtaaaatcaaatatactatgcccttttgttatctcaaaatttaatcttatattttatgtttaagttacattataatttataataaaaataaaaggactatttaaatatataatgtgaataaatgtttaataatttgaaatatgataattttttatgttgaaagcttataatgattatgatataaattggttatagtatacaatttatgggtataacaataaaaaattagaaaggaatttttataaaatgattaaattatatggatatacaaaatgctctactgttaaaaaagctaaaaattggcttaaggaaaataatttagaatttgaagatatagatatggttcaaaaccctcctagtaaagaggagttaaaatcaatttataagactagtggatatgatataaagaaattttttaatacaagtggtatgaaatatagagaattgggtcttaaagatattgtaaaaactgaatctgatgataaacttttagaaatattggtaagtgatggtatgcttattaaaagaccattacttttggatggtaaaaatgtattattgggctttaaagaagatgtatggaaaagtactttgctaaaagaagattaggaagagataggtgtgttgattaaaattattaattaatacacctataaatttatgtattaaatctaatctttataaatattaattagcaaattcaaatcaaaaaaattcatatcaacaaatatattacttcttattacaaattatatcatatgttttatattaaaatattataatattacaacgaattgttacaaaattacttattattaaccatgaacatttgttttgtgctatcatatttatataagggaattgtcataaaaaatatcttgttcatacagttttatatagaaaaaagaaatgaatcttttctttatataagtatattttgtaaattgcctctatatttatagtttaaataatagtggttttaaaaatctgacaacaaaaataaaactttcaaaaaattaaatctaaaaagaataggagataaatatgagtattgaagatttatatgattttgaatgtgttcctttgaacaatgagattgatattgatgttttatttgaaaagatgatagaagatggaaaagaaaaagaatatacaccaattatagtcattgatgaaaaagtagggctattaagaaaaaatatagatatgattactaaagagtatggttctcttgaaaactatagagagtattgtttaacaaaatataatgaaattgatgtaaatcaattttttgattttaggaagagtgagatttcagaattattaaaggagctaattgatttagaagatgatttttatgattataaacattttagaccaattataaatatagatatatttcatgaatataacaaagtttacatagctaaaattccaacaattaaaccatatgaagtatttgcatacatacctattggaggatttaatgattgtcctagagatgaagaacatatagctattgcaaaatattggtatgaaaagcatggaatctttccaatcgcaattggatgtgatacagttcaatattctgtaaaaaatttaactaaagatggtaaaaaatttgatgacttatgtattgaattagtattttattgtgaggatattattatacaagggtatgaaaccttaaaggctcttaaggatgtattaaaacgctctacaatagtgcttttttggtgggattgatattctatcatttagatagtattaaattgttagtcaccaagaatccacttactttagttatggggagtgtgtcaaactaggtttttatacacagtgtagcatagtaatatgtttaaattacaaaggttaaaaaaatactttaatatttttaatattataattaatagatttaaaggtaattataatttataaaataaatactttatatgttataatcattaagaatgtaaaaaaataatatatagttttatagttcatatttttccagatatggaggtaaattttgtgaaggaaaaagaaaaattagataaattaaaaaaaatgttacttgaattaggcagtgttgtagttgcttattctggtggagtagatagtaattttttgcttaaggtcgcaaaagatacattaggtgaaaatgttatagctgtgaccattcatgcaatgatgcattcaagtagggaaattgaagaggctaaacaatatactcaaaattttggcgttaaacatatcatattaaatatagaaaactttgatttaaaagaatttaaagaaaatggtgttgatagatgttatcattgtaaaaaatatatattctctaaaataaaagaggtagcaaaagaacataatataaagtacatagtagatgggacaaatatggatgatttaggagactatagacctgggcttaaggcattgagtgaattaggagtgattagtccattaaaagatagtagtttaaaaaaagaagaaattaggtcgctttcaaaaatattaggattaaatacttttaataaaccatcatttgcatgtcttgcaagtaggattccttatggagttgagataacagatgaaaatttaagaatagtagaaaagagtgaagaatatctattcaatttaggtttttctcaatttagagtgagaatgcatggagagatagctagaatagaagttgggcaggaagaactaggtaaattttttgaaaataacaattttaataaagttgatactaaattaaaaatatttggctttaaatatgttacactagatatgtcaggatataaaatgggaagtatgaatttaaatgtgtagattattttaaaaataaataagttttatagttaatataaggaaacaggaggttttatgaaaaattatacattaatatcgccatgtttttttggaatggaaaaaatgctggctagagagattactaatttaggatatgaaataataaaaacagaagatggaagaataacatataaaactgatgagtttggaatagcaaagtcaaacatgtggttgagatgtgctgaaagagtacatcttaaaattgctgaatttgaggcaaaaagctttgatgaattatttgaaaatacaaaaagaataaactggtctagatatataccttatggagctcaatttcctatatcaaaagcttcctctataaaatcaaaattatacagtacaccagatgtacaagccatagtaaaaaaggctatagtagaaagcttaaagaaaagttatttagaggatggtttgcttaaagaagataaggagaaataccctatttttgtatttatacacaaagataaagtaaccatttctatagatacaacaggagatgctttgcataagagaggatatagagaaaaggcaaataaagctccaataagagagactttagctgctgggcttatttatttaactccctggaaagcaggtagagttttagtagaccctatgtgtggttctggtactatattgattgaagctgctatgattggtataaatatggcacctggcttaaatagagagtttatatcagaaaagtggagaactcttgataagaaaatatggtgggatgtaagaaaagatgcttttaataagatagataatgaatctaaatttaagatttatggatatgatatagatgaagaatctatagatatagctagagaaaatgctgaaatagcaggtgtagatgaatatatagagtttaatgtaggagatgcaactcaatttaaaagtgaagatgagtttggatttataatcactaatcctccttacggagaaagattagaagataaagacagtgttaaacagttgtataaggagcttggttatgcatttagaaaattaaaaaattggtcgtattatttgataacttcttatgaagactttgaatatgagtttgggcaaaaagcagacaaaaaaagaaaattgtataatggtatgttaaaaactaactttttccaatatccgggtcctaagcctcctagaaataataaataagttttacatgatttatttgtaaaatataaaattttattaaaataagtaaaacattatgatgccttgaaacgtctaattattgtgaggagatttttgtgaacaaatttaaagatttataggattaggaggagttaaatgaaagtgttaaagcttattactgtagtagccctgatgatgttatttgttactggatgtaatataaaaactgaatctccagaacaattagcgaagatacctgactatgatgatacaaaaaaagtattgtatgatggtattgaccagttactaaaaccagattcatctatgatattgccttctaatacaaaagaagtaggaaaaataaataaggtagatttaaacagcgatggaattgatgaattagtagtatttgaacaaaaagaagatttaagtaataatgtgagtcaggtagggtttgtaaccttgagttacaatggagaaaaatacgtacttggagaccattttttagaaaatggcgaatcaatagaatatgctaatttttatgatttggactcagatggatataaggaagttatcttattggttaaatccaaagacaaaacgaatatgcatatatataaagtagtagataatgaaataacaaaaatatatgacttggatgcatcatggcttcaaaataaagaagattttaatgacatgaaagtaaaaattggatatatagatggagatgacaagttagacatattgatgcttcatttgaataataagactaatgaaatgtttgcaagtgttgcaaattttgatgggaaaatgaaaatcaaagattctgttaagtttgaaaatgtaaaaaacttaagtgaattatatacaacattaggtaatgttgcttcatctgttggaaattcttctgcagctataaaaggtattgtacttgatattcctatattgaaagataataactatattacgcagatactttatatgaaagatgggaaaattaacaaagcttttagtgattatgataaaactattactaaatcttattatatacctgtagatgatattgacaaagataagattatagaaatacctatagttgcaggcagtacaggtaataataaaaatacttatagttctaaatcatctgcaactataagttggtatagatggaatggaaaagaaggtgctgactcaagtttaatatttacaagtcagatatattataattataaatataattttaaattatttattccaaataatttatttgataaaatacttgttgaacaggaatttgttggagaaaaagcagtatttaaattttactattttgactattcagatcgtaagaatttatttaatatagtagtagagagtaaaaacaaacttgaagatagaaaaaatacaggtactcaaaactctattgtacttcaagagagcgatgaatatactttcttactagttgtaaacaatgcaaatgaaatggataagctagatatgactatagacgcattaaaagaatatttctcattaatatatggttaatattatactcaattggaggttttattttatgaaggaaaagatacttatactagaagatgaaattggtattagaagttttgttagtataaacttaaaaagagaaggctatgaaatagttgaggcaggtactggaagagaagctatagaaaaaatgacaacagaaaatgatattacaatagctcttttagatgtgatgcttccagatataagtggtatagaagtatgtaaatttataagggagaattttgaccaagtaggtataataatgcttactgctaaagctcaagaggatgataaaatagaaggatttatttcaggagcagatgattacatcataaaaccatttagtataaaagagcttttagtcagggtttctgctcttcttagaagagtagcaaaggatgattcaagtgttaagtcgagtgaaatagtttctccaccatttatacttgatatagacaagagaaaattatttaaaaatggaaaggaaattgagcttacaccaactgaattttcaatagtgaaatatctaatatcaaatgctaagcaatcgttaagtagagaccagatattagacgaagtatggggaactaactatttatatgattttaaaatagtagatgtaaatataagaaggataagaaataaaatagaagatgacccatcaaagccaaaatatatacaaactatttggggttatggatactgttttagaaaggaagaataatagtgttacattttgaaggtctgagaaaaaaagtaataaaaaactattttataataattattataatggttactctgtttgaaggattgttcatgttttacatacaaaactactattatgattctgtcaaacaactacttgaatctgaaataaaatatgctgatgaatataatgctattacaatggaaactacaagttttgagaaaaaagtaaaaaatatatttgataaacaaccattaactaaaaattcagaatttggaatttcaataatagataaagataaaaatattatattagaccaatatggttttaaaagtaaagaaaaagcaaactatgaagatgttaacaatgcattaaaagatataaaaactaaaaatttaacaccttatacttatagaataccagatacaggggagcatgttatgagtatctccttaccacttaaggtaaataatataatagaaggtgttgttagatatacagtatcattagatgctattgataatgcaatattaaagcaagctacatggcttatattagcaggaatatttatacttattatagctatactaataagtcttaaatttgctgagactcttataaaaccattacgagagctaaagaaatttgcaaatgaattggctgtaggaaattataatataaaattagaaaagatgaagattgtagatgatgagattggtgatttagcacagacatttgaacacatggcacatgagattgacaaaagtgaaaaattaaaagaggaatttatatcatctgtatctcatgaactaaggactcctcttacatctataaaggggtggagtgaaaccttaggttatgaaagtataacaagagaagaactagacttaggtttaggcattatacaagatgaaacagaaagacttataaaactagttgaagaattattagacttttcaaggctttcttcagacaggataaaacttcatgttgatatagttgatgttgaaggtttaattgtaggtgttgtaaatcaacttaaagttaaagcagctgaaaaagatatatcacttttatttgaatttgaaaatgaatttatagagaacattcaaggagataaaaatagattaagacaggttctcataaatttaatacaaaattcatttaaatttacgagtcaaggtggttacataaaagttgtagcttctcaagatgaagagataacaaccatatcagtagaggataatggttcaggtatagaaaagcaaaatttaaataaagtgttagataaatttttccaagaagattataataaggctggtagtggattaggattagcaattagtaatgaaattgtaaaacttcatggtggaagaatgaaaatagaaagtgaaaagaatgttggaacaaaaataacttttaatataaaaaataaatttgctaaacaagcataaattcttagaaagaggattaagatgagaaacataaaaatgatagtagcatacgatggttcaagatataaaggatatcaaaaattaggtgacaataatatgactattcaagaaaaacttgaaaatgttttaagtaaaatgactaatgaaacagtggagataatagggtctggaagaactgatatgggagctcatgcaagaggacaagtggtaaattttagaactaattgtatggattctttggataaaattcaaaaatatttatatgaatatttaccagaagatatagttgtaaaaactgttgaagaagttgatgaaagatttcattcaagatacaatgtaaaatcaaagacttatatgtataaaattgacaataataagtatcacaatccttttataagaaaatatgctactcatgtaagtaaaaaattagatttagatagaatgagaaaagcaagtgagtatttagtaggagaacatgattttactagttttgcttcttctaaatctaagaaaaaatcaaatgtaagagaaatttattctataaatataaaagaagatgataatgttatagaaatatatgtagaaggaaatggatttttgtacaacatggtaaggataatagtaggtgctttgatagatgttggtctaaaaagaagagctccacaagatattaagtatatgcttgaatcaaaagatagatgtcaatcatcagatactgcaccagctaaaggactatgtctttggaaagtaacatattagtcaattatataaaactctctttaaaataaaaataaaataaattatatagttgacataaatggaaaaataaactattatatattttataagagagatataaaactttatatttaaatcctgtgagaaagagagtaacttctatgtgttttatagagagctgaggatggtggaagctcagcaaataagtattagtgaaaagaactttggaggatactaattgaatttagtatgttagtaggtaatctcgccttaagagaaagagtggataagtttatcttatcaattagagtggtaacgcggatatatttcgtctcttggtttttccaagaggcgttttttaatatatttaattattagtgtttatctggtatgttgaacatttactaattgattagctaagtttatcaataagagtggtaccgcggatatttcgcctcttagtattttaaaatactaaggggtttttttagtattaaaatgattttatgtgagtctaaattctcagagtcattcaatattaagaatttctataaaataaaaattataatttaagattgggaggaattaaaaatgaaggaaaaagtagtattagcatattcaggaggacttgacacatcaatcataataccttggttaaaggaaaattatgaagatatagatgttatagctgtttgtggaaatgtaggtcaggaagataaaatggaagatgtatatgaaaaagctttacaaagtggagcatcaaaggcatatgtggatgatataagtgaagaatttgtaactgaaactatatttaaagccgtaaaagcagaggctaaatatgaaggaaaatacttattaggaacttctttagcaagacctataatagctaaaaaattagttgaagttgctcataaagaaggtgcaaaatatatatgccatggatgtacaggaaaaggtaatgaccaagttagatttgaagctacaattgcagctcttgacccgactataaaagttattgcaccttggagaatttgggatataaaatcaagagaagatgctatagactatgctgaaaaacataatataaaggtaacagcaactaaagctaaaatatattcagtagatgctaacctttggcatgtttcaacagaaggtggagatatagagcacctagaaaatgaacataaaaaagatgtttataaacaatgtgtagacccagaagatgcatgtgatgtagctgaatatgtagaagtttactttgaaaaaggtgtacctaaaaaagtaaatggcgaagaattatctccagttgcactgattcataagttaaatgagttgggttgtaaacatggaattggtgttatagatatagttgagaatagacttgttggtatgaaatcaagaggtatatatgagactccaggaggaacaatcctttatgaagcacataatattttagaaagtgctactttagacaaagatacattacatttcaaacaaatggtatcttataaatacggagaacttatttacaatggactatggtattgtaaattaagagaatctatagatgcatttatggaacaaactcaagataatgttacaggaacagtaaaagttaaactttacaaaggaaatataaaacctgctggaatatttactgaaaatgctctttatgatgaaggaatatcttcttttggaaatagtgaactttatgaccacaaagatgcagaaggatttattaatttattcactttaccattaaaaatcagagctatgaaagctggaaaataataaaataaattatttaagagtgtataaaaactatttttaggtttttatatgctctttttttatttgaatttattaaattatacagtaaatagtataaaaaaatatattatagttccaaatgacttaataatgtgaaaatataagacctaaaatataaattttataaatacaatagttattgactctctcattgtaagagggtttatactgaatctaatgaaaatttatagtgaggagatagattatatgagaaaaataattgaaattaaacatcattcacatgattatgagtgtatgtggaatggtatagaagatttatatataaataaaaccggtgaatgccttccaaacgattttttctttttactgtcaggttttggttcattttgttatatgaaaacaaataaagctgatttgaaaagaatggtagctttgggagatggaaggacaaaacagatgtataaatttttagcaccaattgttggatttgaatacaaacatcatgagtttaaaaagtatgagcaagcattaaagaaagcaaaatctgaaattgatggtggatatccagttattttaggagctttagatatgtattatctaccatattataagaagctatatcataaagaacacattccttttcattatatattaatggtaggatatgatgatgaaagaatatatctgtatgattgtggtagaacagaattattacatctttcttatgataaattacgtgaaagcatgaattgcaattcccctggattaagcaaagaaaatactatttgcacaataagaatgaatacttcaaagaataaatataacattgctagagaagctattgctataaagcgtgatatgtttttaaatccatctaaaggatttttgggatataaaggttttgaaaagtttattaaagagttgccacagtggaacactgaattggataaagatgattatgataagattttgaccaatatggttatgttttttggaacagtaccaacaattccaaatgcaatcaaaggaattaaagaaccagatactgttcaatttaaaggtggatttgataaaatgagtagaatgctcaacagtattggggaggaatacaaaaacgactcttttatacaagtagctgatatttttgataaaactgctattataattgagaaaatatccaatattataatagattatttaactcaaacatgtgatgatacagaacaacttccgttattgttctctgaggtcttagagcatatgaaaacaggatatttaatcttggatgtataaaaaatatattgttgaccctaacattacgtaatagtgtaatatgaaaatatagcttgaatatattagtaggtattgatggctgtaaaattaaaatttgaggtgtggatatgagaacagtgaaacaagtttctgatttaactggaataagtgtgagggcattacattattatgatgagataggtcttttaaaaccaaataaaattacagatgcaggatatagactttatgatgatgaatctattaaaactcttcaacaaattttattttttaaggagattgatattcctttaagagaggttaaggaaataatgtcaagccaatattttgataaggttgaagctctaaaaaatcaaaaaaaattacttattttaaaacgaaagagactggatgaattgatagagcttataaatcaaactctaagaggagaaggaaatattgattttaaagagtttgatatgagcgagtattttaatgttttagaagaatttaaaagagaacataggaataagataattaaaatttatggtagtgtagaaaaatacaatgaatatatagaaagagttaagtctaatgaagagaaaattgctaaaatggctataaaacaatatggaactattgagaagtttgcccaagctataaaaacaaattttagcagtgatatattgaatttaggagaaaaatttgatagatataaaaatgattgtttaaaagaaaaacatccaaaattaaaagaattatatagaaagcttgtagaagatttaagtaagaatccttcttcaacagaccttcaagaaatagcaaaagagataacagatatatctaaaaaagattatgaaattttctctatgtatactggtgatgacaactggtattatatgattcaaaattatctagtaaatcctatgtggatagaagaagtagataaaaagtatggaagtggagcaggcaagtttattggacaagtactaaagacttatctaagagatagaaaaccaaagataaatacattgtatgaaaaacttgtagaagatttgagtagagattgttcttcaagggaagttcaaagcattgttgaagaaatagacaatgaaatgaaaagaagtaatgaattttataaaatagacaatggtgaaagatactttgattatatgtcagagctttatttacaagattctaactatataaaagtaactgataagaattatggtgatggtgcatctaagtttattggagaagcttttaagatttattttgataataataattgttgaaaatttggaagtaaaaaatatgtaagttttataaaagcacaaaaataaggatgtagattagctccatctatatccttatttaaagttattaaaatatatagtttacatcaaacttaacactttcaataatatttcccaaatatgtttttatactttcaacttcttctaaagattttaatttattttcagtataaattgctttgtccagaatattaaaccttaatcctatttcatcaaagtactcatgatttaaaactttgtaccaatggtttttttctttattccaactcgtagatattgaatcagcttctttttgagctttttcccaatcttcattttctatagatttttctaaaacagatatattgtctttatatccttctgtaaaatcatatagtttattgttaacgtaaaatccaaataatacaaataagatagtccatagtataacaaatgttgtagatttcaatattaatcaccctttttattttgaataaatattttgtcattttcatctaaaacacaaataagaacatctttaaaagtttctatgtgattagattttaaaatacccattaaccagttagtatctttttgagctatgtctagatttttatttattattctaccatccagtataagtgggataggtaaatgattaaaagctcttggaggagtactattgtagcttgatgctggtacaacacttagattaccatcagtctccaaaatagcatattgtacatcttttaggttgaagtatccttgaatcctaagttgttctaataattcatctatactaattctttcttttttaagctctttatatacaatttttcctttatctattaatacagaaggtttacctgataaaaatgaacttaattttctgctttttaatgataagaatgaaataagagtctgcatgattacaagaccagatattgctgcaacaccatttatgattggtatattattattttccattgggacagatgcaacttctgcaattaatagtgttataactaaatcaaaacagttcatttcagctatttcaccttttcccatgactctaagtgcaattagcactgttatgtataatataatacttcttattaatactactgtcatatctatcaattactcctttaaaaaatatttacacttagttagtatatcctatataaaaaatttaattcaaagtataaaaaaccttaaataattggattcaactatttaaggtttttttgataattttaatattaaattttttatggattttctgttacttttatttattttaataacagattcaacaaaactctttttatctcctaattttaagataaaatcaggatattcttcaaattcattgagttttattaatttgaaagaagaagatagatttttaaagttaatgattttagagttattcactaatacacttctttttttaaaataaatttcttttttacttatatttagtatagttaatatttgtttaagatatattattatatcttctggagttctatcaaatttgagttcaaaattttcatcttcaaagtagggaatataatataaaggtgttttgagagcaggtaatttattatataattcttcaagaatatcgatatttttaggggagttaaagaaaaagcatttacatacgttcattaaatccacagcatctgaaagtgagttatgtttaatatctccttctacagaaaaaatttttttcatattcagtaaagatatttgcttagataagattctattattgtatgtaatatgttgagatataaaaggttgaatgtcaatcatcatattaaataactctaagcatttacctgtatatttatatactctaaatgaagttagaaggccagttatatcaaaatcaccccaattatatattgtaacatcatcaaatttacaaaaccatttataaaaatcatccataacatataaaagattaggagcattattgatatctagttggttcaatttggttaaatttttacatttatttgaaagtattttattgtattttggcttaactaaagagtaataattatctattgtattaaattcgttatcaactaaaactccaccaatagaaattaattccgcaccattatattcttttggtttatttttattatcatctagtatattaaattcaaagtctataaataacttgtatttcataaatctaaagcacatcctcaggtaaattatttattgagcctaagcatcataagaatcaatagatataatgactctaaacatcaaaggttcattacaacttttatttatttcataatttaattcaaataaatcttttaagatataatttataagtattctttcccaacccatttttaaattaactttagagtctattaatatattttctatctttttaaatatttctatatttgctggtattatactgagctcaatattacttttaaacgggttagactgtaaatctgttataagtatattttttaattcctctgtaagttcagaaattaaactatcacctatgtatttttttatgatttcctctctaatttcttttaaatttagcaatattagtacctgctacttacatagtagcttttcctttccttttaatactattattcatttttgaatcttatttagatatattttaagattaaaagtctttagctatataattttttacccatttttaacttatattaacatattacaggcttatatctccaccctgcttacattgaggatggagtatattgcctattttgataaaaatgataggttgttatttgcctattcctttttctgataatttttctaacatatctttggtcattttatctaaatcataactaaacttaaagttccattcttttactgcactactactgtctagagagttaggccaagaatcagctatactttgtcttacagggtctacatcatattctatcacaaaatcaggaatatatttttttatagaatcagctatttcttcaggagaaaagctcatagcagtaatattaaaagcatttctatggatgagtttatccgctggagcttggattaaatccactattgattgaagtgcatcaggcatatacatcatatccatttttgtaccttctgctatgtaagatttatatctcttattttttaatgcctcataatatatatcaactgcataatctgtagttcctccaccaggaggcgtaacataagaaataagacctggaaatctaacacctctagtgtctactccaaattttgagtgataataatcacatagtaattctccagaaactttagtcacaccatatatagtattaggtctttgtaatgtatcttgaggagtcatattttttggagaattttcaccaaaagcagcaattgaactaggtgtaaaaaatttacaatccaattctttggctatttcaaggccatttattaatccattcatatttaagttccaagcttctaggggtttactttcagcaactgcagaaagtaaagatgctagatgaattatagtatctacatcatatttttttgcaatttcaaaaaaacgattcttatctgtaacatctaatatctcaaatataccagattcacatactggattaccttcttttactctccttgaactagcgattacattttgttctccatactcatttctaagctttattgttaattctgaacctatttgtcctaatgcacctgttataagtatttttttcaattttacaacctcctaagggtttaatttatgtagtactacttatttttattttagcaaatcttttgtttaaatacaaagaattaaagataataatatacgacttaattgaatgaagtgcagtaaattcctaaaaatttaaagttgagatataatggtctattgtataacaataaaagactagattaaattattatatagattgtgtgactaagtcacagaaagtatagttaatttaatatataataaaagcatatcaagtaaagctttaaattaaagtaactttatataaaaagtaatataaattgataaaattataaatttatttatagtgaatataggttggattttatagatacaaaaatagtatatatgatatgtagaccattagcatgtttaaagtagcaaaacatataaaataaaatttgaaaggaagtataaaaatgacaagaccatcaatatatcatagccaaggatacacttgtgcagaggcattaataaagtcttataatgaggaacacaacacagatataccaatctcaataggaagtggtatgggggttggaatgaatgttggaagtgtttgtggagctgtaaatgctgctgttgttataatagggtatttaaatgggcgaaatagtaatttagatgaaaatatagcaaggaagtattcaagagagctattgaataaagtaagaaataaatacagctcagaaatatgtgtatctcttaaaaaaaataaagtaacttgtgaagaaataataaatttcacatatgatgctctaaatgatatgctaaaaaatcaaaaataattctaagaaacaagtattttacattcgatagaatacttgtttttttatgatatttttaataggtattagtttattataatttttaaatcaattttattatattttaattgaaataatctactttgaaaattactaactgacaaaagaatatgattatagtatagaaaaaatgtaaattatttaatattaagtgagagtatatgcttacctatataaaatcgtataaattaatggctaaatttataaattataaagaaatatataagaaaacaaaagaattaattagtataatataaagttaaaaagtgaaaatttatataatttatttataaagtaaagaaaaaatagaaatttgtaatgaaataaaaagtttatgacataatatggtataattagtaaaaatatagagattggaggaattgctttgtttatagatgaagaattagaagggtatatattaacatgtaaaatatctgaagactttaaaaatatacctgaatatagtgatgaagagttttatgttacagtctataaagatgaaagttctgactctgggtactatgctttattagaaaataaagaagaaagagttgtatgggatggagaagttgttgccaataatatttttaataacctttggattgtagtaaataaggttaaaactggataatagtctaattatatagtatttgtaatattttaaatgaatttttacatatttgagatgagtaaataacaaagattattcgatactggaggagtaattcaatggaatatagttatagtaagatgaacttaaaaaaaggggatattgtagaggtaaatttagagaaacaagccaatgtaatattgttagaccatataaattatgtgaaatttaaaaatcaaagaaattatgattactatggtggatttgcaaagaaaaatccatgtagaatgagagttcctaatactggaacatggtatctagtagtaaatcaagatggaaatagtggaatagtaaacttttcaatcaatacaattcaaaattaattttagaatattggatattcttactttttgtactttttatatagttaaaataaaattaataagcaattattataaaataatgtgggtgcctcaaaatgaattttataattcacgagacactcttttttgtataaactcaaatatactttatcatttcaacaatgaaaaagaggcgtatctgtgttttgagatagcctcatttatcatatatcatatatagaattttaattattcttaactaaaattttttccataggttatctgtacaattaaaatatttattgttagcatacagctccacctgtaaggtgtaaaagagcctctagtatctcttcttttctttccaaaacttcatctgataaaagcatttctataaatttatcagcaccaattctatcgatagttattccaaaacgttcacctgtgttaccctgttctctaaataaaagaattgctttttcaattaaagtcataagttcctcttttgaaaataatctatcaatctgtgttccaggacgaactgattttccccatttccctcctatatagactttataaccagattctttttcttcaatactatcaaaattacaactttctatacacttaccacagttattacatagattactgtctatttcaagtttacctttatctgttaatttagctgctttaacaggacagacctctacaacagcacattttttacaaccaacacaaagctctgaatcatagtcaggtacacgttgaccaacaattccaagatcgtttaggtcaggtttaatacagttattagggcatccaccaacaccaattttgaacttatgaggtagttttacatcataccaatttttgtaaaattcttcgtgtatttcagtagcaagtgcctgtgtatcagctagaccatgaacacaaacagtacctttacaagccacaacaggacgaacccttgatccagttccacctgttattagattttcgctagcaataaattcacttagagcttcaatatcttcaaattttacaccaggtaattctactgttagtctagtagtaaatgctaactgaccgtttccgaatttttcagcagcttctgcaattttttttgcttgtgatgcatttattacaccatttacagttattatacgtgctgcaaaatgttctccatccctgcttggtagaaaacctctaccttttacttcctttttttgttctgctgtaacattactcatatttactcctccattaccttaagatttggataaaatagtattccaccttcaagaactttcgtatttgtatagccaaagcgtcttaagcgattttgcgccatatagctatttttacctttagcacatataagaagaattttttcatccttagcaagaccttcaatttctccattaatttcaccaacaggaatataacgtaaactaggaatagaaggagcttttgaaacatcaagtttagtccaactgtcaaaatcctcaatttcgtcaagtaaaacactatcaagttctccgttaagtttattttgtaaaacatttactgccactacaaaagggtgaatagctgttgaaaaaggtggtgcatatgcaaggtccatactttctaatgaataaaggtcagcgcctaaagttattgcagtagcagcgatatctactattttatcaaccgctccaggtcccataacttgaacacctaataattttctagtatttttttcagcaaccattcttataataaaattagatgcacctggataataatgagctttatcatcggtagctatggttacagagcaaacattataaccttctttttcagctatttctttacttagacctgtttttcctgcattgagctcaggtaattttactactgtcgttccaagaacaccattgtaagttttagattttccagatatattttgtgcgcaaattctaccctcatgatttgcagatgaccccataggtgaccatgtaggtttatttgttaaagaattttttacaaaagcacagtctccaactacgtatatatctttatcatttgtaagcatatattcatctgcaataattgtattattaggggcaaattctaaacctgtgtcttttagaaaacctgtgttaggacggattccaactgacataaccactaaatctgttttaatagctctatttttagtacgaagtttttcaactttattttcaccttcaatacctacaacctggtcacctgtaaaaatcattatgcctttatcagccatatgattttcaacgtattcagcaaaatcagtatcaaatccaggcataacatgttcagccatatcaacaacacttacacgtatacccattgcagaaagattttcagcaatttcaagaccaatgaaacctccaccaataacaacagctctcttaataccgttttcaatagaatctcttagttttatagcatcatttggagtacgcataaagaatactccaggtaaatctattccaggtattggtggttttattgggtctgcccctgtagcaattacaagtttgtcatagcttagattttctttttctcctgttgaaagcgttttcaaagttacttgttttgcatttctatcaatagacgtaacttcaactccacaacgaacttctgctcctgttagtttagaaaaactttcaggtgtatttacgattaaagatgatttatcttcaattatcttaccaacgtaatatggaagaccacaacctgcataagaaatatcatcacctttatttagtattgtaacagagcaattatcacccatttcacgttttatttttgcagcagtttttgttccagcagcaactccacctataattaatactttcacaatatatcacactccaatctactttataactctataataaaattatacttcttgacaatatatttgtaaaatactaaaatattaataaaatcataagcatttactaatgtttgctaaggttgtgataatatgacaattcgtagtcttgaaatctttgttaaggttgctgaatgtggtaaaatgagtgaagtagcaagaaatatgtatattacccagtcatcagttagccaagctatttcagaaatagaaaaagagtatggtgttaagttatttgatagaatttcaaaaaaattatatttaactgaggcagggaaaaaacttcttggatatgggaggcatcttttagctgtaaatgaagaaatgaatgattgtatgaagcattgtgcaaaaaatatccgtataagagttggggcaacagtaactgttggtacatgtgtaataagcccgataatgttagaattatacaaggtaaatcctcttatagaacctgaagtatttgtagaagatacaagactgattgcaaaaaaattacttaatagtgaattagatattgcgattgtagaaggaaaaattaagcacccagatattgttacaaaaagcattattaatgataatcttgtacttatatgttcacacaagcatgagttctacaaaagagactctataaaagtttcagaactttcaaatcaaccattaattatgcgtgaattaggaagtggtacaagagcacaattagaaaagcaattaaaagaattaaaaatcccaatgaatattagatggtcatgttataactctgaagctatattaagagcagttgtagataattttggcattgcagttatatccgaattacttattgaggattatttaaaaaagcatcttttgtgggcttgtgatattgaaggtattaacttacatagaacattcgatattgcatatcatagaagcaagttttttacagaaaatatttcagcattttttgatatttcagtagaatatgggaaaaaacaagcgagaaagaagagtagaagtgtaaacagtttataatatatctaaataaaaataagagtatatcaatatactcttatttttatttagatatattagcctatattaacgccaaaatttttacacaatcctgcaagtccatcctcaaatccagaacctaaagcattaaatttccactctccattatgtctatatagttctgccacgactattgctgtttctatgctaaaatcttcacccaattcatatttaataagttcctcgttagtttcttcattatatattcttatatatgaattttcaacttgtccgaaattttgtcttcttgtaattgcttcatttatagtaacactaaatgatattttagcaatattttgaggtattttagataagtctacatttatttgttcatcatcaccatcaccaacacctgttctattatcacccatatattcaacagctccagaagcgtgttttaaattattatagaatataaagtctccatcattcgttacttttccatcagttccagttaaaaatgcagaggcatctaaatcgaaatcaaatccaccatcatatttattaatatcccatcctagtcctactattactttttttagaccagggttactttttgttaaacttactttttgtccttttgctaaagttatacccatttaaaccaactcctcattataaattttttattgtaattattacttatatgtattaattaattcacgaagctcttcattttgaccaattcctaaagcattaaatttccattcttcatttctacgataaatttctcctgccaaaactgttactttaccagaaaagtcttcttgaagattatatttaaataattcttgcttggaatttgaatcaattaatcttataaaagagttgttcatttgaccaaaatcttggtctctttttttagctttgtatatagaaactccaaaaactattttatgtacatattcaggtatgtcttctaaattaacaattatttgttcatcatcaccttcaccttttccagttaagttatctccagtgtgtataatagctttagaagggtgtttaagatttccaaaataaaccaagtcacctctaacattcattttatcttggttagtcaatgctattgcaaatgcatctaggtcataattttttttacccaatttattcatatcccatcctaagcctactactagattttttacaggattattatcttttactaagctaactctttgtcctttttgtaaactaacactcattttaagttctcctttttatatttttagttttattgatggtatcaagtataagaaccatattagctatattatatacgtatttaggctaagttggctatatttataaattatttattatataactacatgaatattttataatttaaacatattgacattatatgatttaaattattttgtagttttataatatttaaatttgtatttgattgttataaagtaaagtaagtaataaagttagactcaataattctaaaatttctaagcacactatctaaatgagaacgtatttggaaatacttgtataaaacaataattgatacatttaatttttatcttaaaaataacaattataatatataaatagaaagtataatatataaatagcaagtataatataacatataaaaagttgaatttgtatatgttaattatacttgctatttattgttagttattctatttttttaaatccattacctaaagcttcatgtatatctgtaattataataaaagcattagggtcgacattttttactaatttttttaattcgacaacttctttcttttcaactactactaaaagtacatttttattttctccagtatatgcaccttctccttttagaatagttgcacctctatctaaatcttccattatttttttacttatatcttttgaaaggtcagatataatagtgaatgatttggaataattaaatccttcaataagcaagtcactaacttttactaaaatgtataaagccacagttgaataaagtgcaatttcaacctgtctatttactatacctgataaaacaactacaacgcagtctacaatacccattaaaacaggtatactaaatgtaggaaaatatttatttagtaggagtgccattaaatcagttccacctgtagagccatttattctaaaaataagtccttgaccaactcccattaaaatagaaccagatataattgcaagatacatatcatttgttatatctaatgtagccatatttgcagtaagcttaagtgctatggtaagaaaaattattcctaaaaccgttttaaaacaatctttttttgaaagtattttgtaagcaaatatgaataatggaacatttaaaagtaaattgacaatccaaagttctacaccgaataatgaatttaaaacaactccaagtcctgttataccaccagcagcgattgcatgtggattaaaaaataaattaagagaaatggccattaatatacagcctacaattaatattaaaatttctgaaaaagttattctatcttttttcaataacatcactccttatatatagattataatatatattatatagtttttccaatttttaataaaagaaataaaaatatattataaaaacaatttgattggaattttcagaaaattaatgctataattaaaagtaaatttaaagggaggttataaaatggctaaattaactctagaacatataaaaggaaatacatattatattccactccctacaatagtaggtgtatacgtagatggtaaagatgcaattttaattgacagtggaaataataaggatacagctagacaagttttaagattattagaagaacataatttaagtcctaaattaataataaacactcattcaaatgcagaccatataggaggaaatgcatatttgaagaatcaaacaaaatgcaagattgctacgactaaaattgaaggatattttacagaaaatccaatattagaatcagcatttttatatggtggctatccaagtaaagcactgaagaataaatttttattagcaaaggaaagtgaagttgattatattataccttcaaatggcaaaattgtagatacagaacttgaagcgatttctcttccaggtcattattttgaaatgattggtgttagaactccagataatgttttgtttgttgcagatagtcttacaccagagaatataattactaaatatcattttttcttcctactggatatagattcacagtttaagacactagaaaaattgagaatgttagaggctgatttctttgttccaagtcactctgtcaaaactacagatataaaaagtttgattaatattaataagaagaagatggaagaaataatagataatattaaaaaggtttgttatgagccagttatgattgatgaagttattgaaaaaatgtgtgatttgtacaatgtcaagcttgatgctaatcaatatgtgttggttggaagtacaatacgttcttatataacttatttatatgagaataatatggttgaatatatatttgatggtggtaagatgatgataaaagctgtgtaaatagtaataattttcaaattatatgatgaaattgttttagtatgactgttatttgaaaagtaacataaaaaaatttatataaataagctaagatgattgatataaagttactgataattttaaggtaatatatacgttactataatattatgttattatttgtaaataaggggataatttataagcaaattaaagaccttaatttacaggaggaatagtgtatattatgaataaaaaattcaaaaaattcagtaaaaaactaagtatattaattttagttttgactatgtttctttttaataatttaactgcaaatgcacagattaaagaagattcaataataggaattgatagatatgaaacagcaggacttatagcagatagacaaacttatgatactgtaatattagttaatggagataaaaatttatctgatgggctttcatcaagtggattagctggagctattaacgcaccaatacttttgactaaaaaaagtgaaataccaaaagctactttaaatagactagataataagagtttaaatgttgtaaaaaaagtatatataattggtggttataatactattgaaaattcagtagaaaaagatataaaaagaaaaggtattcaagtggaaagaataaatggtaacaatagaattgaaactagttataatgtagctaaaaaaataaatgaagtaagtagtgtaaaagaggtaatgcttacaaatggatttgtaggagaggctgatgctatgagtatagcacctgtagttgcaaaaaataaaggagctataatacttacagatgggaaatcagttccatttaagactgaaggtttaaatgtttacgctataggtggcaaatctgcgataaatgaggatttagtaaatgaaactaaagcaactagaatcggaggaaatgatagatttgagaccaataaaaaggtaatggaaaagttttataatggagcgacagatttttatataacaaatggatatcaattagtagatgcactaacattatctcctttagccaaagaaaaaccaatcgttttagttgctgatggaagtaataaaggtattttaaaaggagctaaaagtataacaaaagttggaggtattgatgccaatatatataaacagtgtttagatatgattaaatataataatatggatgtgactccaaatattttaaaacacttaacttcagttgaaggaaatgaagtttctgaaatacttatagaatcagataatttaggtgtggttgttgaaaagacgaataccaataaatttgagtttgattacgtaagtgtaactaatgaaaaaaattgtactttttctgtatataaagaaaattcttctaataatgtaaaaaatggaaagctagttgtaagtgctaagaaaaaaatagataagaaagatagtgatttgcaagatatgaatggcgacaatatgataaatgcaaataaagataggatggtaaatgtgataaaaattggagttcccgataaaatgtattctaattttaaagtagatgttgaaagtggttcagtagaactttataatattaaaggaggagctactgttgatgtcaatgacggaattgctaacattgttgataacaatgtgacaaatcctttcaatataaatactaatagtgggatttcaggtgtaacagctgaaactatatcatctgagataaaatttagagcaaacaatggaattgtaagtgtaacagctacaaatataaatggcaatataagtttatttggaagcgataataaaggtacctttgatggaatatttaaattaaatctgaaaaaagaaccatcaaatttacacttgaagttagttggaaatgggataaataaattgccagaaggttggtctaaagattatattttaggaaatggacaaccaattattgaagttaaaaataatggcataaataatatatcaattggagaataaaaacatatgaaaataaagtttatatagttttaaaaattatagaattttaaaatatttatatatattctttaaataaaaaattattttttaagtgataattaagtatttatcgataaggctatggttgtaaaaatcatagccttatttttatattataaataaattagagtatttatcaattcatagtagataaaattgaaattaaatataacaacaaaaaatgaaaattacaattaatttaatgttaaagactcaattatttggatgtggaatggatagtacaagtagtatataaaaagtattgactggacaaataactatattttattttaaatatataatataatgtaataaaatatatcaaatgtagaaggtgataacctatgaaaaaaataacaataaatgatattgctaacttggcaggagtatctaaaagtactgtatcaagatatctaaataataaagatatcagtgattctactaaagagaaaataaagacaataatagatgaatatggatatgagccgaatgcatttgctcaaagtttgagagctaaaaaaacatactttattggtattataacaccgtgtttagattcttttgtaaaatctaaaattatgatggcaatagatgaagaactcaaagaattaaaatatacatcactaattattaatactaatagaaaaataaggtcagaaatagatagtatatcaaagttagctagtctaaaagttgatggaataatactaattggtaccgaaataactaaagaacataagaatgaaattgaaaagttagatataccaatggttgtagttggacaaaaagttgatggtatcaatagcatagtgaatgatgattatggagcaggatataaaatgggtcaatatattgctaataaaggttacaaaaacattgtatatttaggtgttgatgaaagtgatatatcagttggtttaaatagaaaaaatggagtacttaatgggttaaaagataaagggtatgatgcaaaagtattttatactgactttgaccaagaaacgtctatacaaagaagtggagaaatgctagaaagtgaaaatccagatataataatatgtgcaactgataatatagcaatagcaacaatgaaagaaatcaataagagaggtaaaaatataccacaagatatatctgtagctggatttgggggatatgatgtattgtctattataagccctaaacttacaacaataaagtttgaaaataaaaatgcaggtaaagtagcagcaaatacgatagtgaacttaatacaagaaagaaaagaaccactattaaaggagattaaatttgaattaatagaaggtgaaagtacaataaataaaaattaagatacacattacatatattagtaatgtgtatttttttactaaaaaaactataattctaaaaattaggaaaacttttttgaaagaaatattgcatctgaaataaatttatgctaatctttaattaaaccggtttcgaaaccggtttaattaaaccgaaagaatagcacaatgagtgcaaaaataactgattgtaacaaagtatcaaagtaattattagagtacataggaaataaacaaaatataaaaggtgtagcacattgtgtaacaagattaagaattgttttagatagtaataataaagcaaatataaaattacaaaagaaaaggaataaaaatatgtacaaagagcctaaatatagaaccatattagaatcgataaaagaagaattaaataaattaagaaatatatctttaaatgataaatataaaccactatttcatatacatccacaacatggactacttaatgatccaaatggattagcatattataatggtaagtaccatgtattttatcaatggtatccatatgatgcaactcatggaatgaagcattgggcttatgtaagttctgatgattttgtaaactggaatagagaagatgtagcattaataccaatcgaaagttatgaatctcatggagcatattcaggtaatgcgatagaggtagatggaaaattgcatatgtattatacagggaatataaaatatagtgcagaagatagatatgcatatcaaaacttagctataatgaacaaggatggtaaaataactaaatatgaaaataatccaatagtaagtgaaataccaaaaggatatacaggacatgtaagagacccaaaagtatttaaaagaaaggataaatactttatgttacttggagcacaaacaagtgataaaaaaggagttataatagtatatgaatctaaaaactctatagattggaattttaaaggagaattaaatgtaaaaaatatagatgaagattttggttacatgtgggaatgtccagattatattaatatagatgaaaaagatatattaatattttcgccacaaggagtagaacctaaaggatttgattatcaaaatatatataatgtagtatatgctattggtaatatggatttagataatttaacatttgaaatagatacaatgaaagaactggaaaaaggatttgatttctatgctccacaaacatttataaaggactcacaaataatactatttgcatgggctggaatgggagaagttttataccctacagataaaaacaaatgggcacattgtctaactgttccaagaaaattaaatataaaaaataacaagctattgcaaatgcctgtagatgaattaattaaattaagatatgatgaaacaagtgggcaaaatactataaagaataatatcaatattatagaaaatgatgaaaatgtatatgagcttaatattaatataaaaaatattgacagcaataaatttgggctggaattattttcatcacaagatgaaggtgtaaaattagaatttaacaaattaggaaacattgtaactttagacagaagcaactttaaaaaagttttcggtgttgaatatggaacaaatagaaaagaatatataaatattgatgaaaatactaatatcaaagtactagcggatagaagtgttttagaaatttttataaatgatggagaagtagtatttactagtagaatatttgctaaagaaaattctaatcaaataagggtttatagtgataaaatagtagagtatgagtatactaaatttaaattaaagcaaggtattgaattataaaaacacattataaggggtagaaaagatgaaaaaagtaattagtataggagaagctttaatagactttatacctaatcaaaatggttgtaaattaaaaaatgtatcagaatttagaagagtagcaggaggagctccagcaaatgttagtgttgttgtagcaaagcttggaggaaaatcaagttttatatctaagttaggaaaagatgcatttggtgattatataatagatgtattaaatgaagtaaatgtaaatactgattatgtattgagaacaagtaaagcaaatacaggacttgcttttgtatcattaaaagaagatggtaatcgtgatttctcattttatagaaatccaagtgcagatatgcttttagaagctgatgaggttaaaaaagagtggtttaataattgtcatatcttacatttttgttcagtagatttaatagatagtccaatgaaattagcacataaaaaagcaatagaatacgcacttgaaagtaatagtataataagttttgaccctaatataagattacctttatgggatagtgagcaatcttgtaaaaaggcaatatcagaatttttaccttttgctcatattgttaagatatctgatgaagaattagaatttatgacaggagaaaatgatatagaaaaatcattacataaactctttgtggggaatgttgaactagtattatatacaaaaggaaaagatggagtagatgcatacactaaaaaagtaaaaggtatgtgtaaaggggttaaagtaaatgcaatagatacaaccggagcaggagattcttatataggttcatttttatacaccttattgtataaacaaataacattgaatgatataaaagaaatgaaacaagaaacgttaaatgagtatttagaattttctaattattatgcagctcgtagtacaactattaaaggtgcgataagttcatatgcaacaaaggaagagataactgaatttataaaaaatttatagtaggaatgagtaataggttttgaaggaagtaacatgtaaagagtttttaaggatgtttactatgaaaataattaacatataaaaagcaataaagaggctgtctcaaaatagatataagcctctttatcattgttgaaatgataaaaaatattttaattattgttactttttagaagaatatatatcttattttaaataagcaaattatgtaagatttatttatattatcaatactttacttggagtattatgtctttagcagttatctacttcaattgaattatctaaaatataataaatttgttttgcaaattgacgagaatgtttttctttttctttattcataaaattaggtttacctaaatcacgttcaacaagcattcctatatattttaactgtgaatgcttacagtagcgcttcataccattttcccaaatatcagcacccttttcaggtctatatccacatgttgtaataagtgctactggttttcctgcccatagagcggggcctttctcattaccatagtacttattcattccatacaccaatctgtcaagtagtgctttcattggagaagtgcagtaccaagaataaattggagtagcaaaaacaattaaatcacacataagaattttcttgaaaattttctgaacatcatctttacaataacatccaaaatcaaataagttatcctgacattttttacaagcaatacatggctctattttacaatcatataaccatattacttcaatatttgaattataattttctaattcctcaataaaaggttttaaaatagcagcagtattaccttttttcttaggacttcccataagaatgcatatttccatattgatacctccacagtattttaaaatagtttttagtgcttaatatagttttaggatactatgagaatacgttaacaacaatacactttgtatatttttaataaaattgaaacaaattgttttatcaataaaagttggaatgtatctataattaaaaatattttaggtatgtttttacatatatgtgtgtagttaactatggtaatttattgtaaaattatcttataggattataattgcttaatttatgattatatttaaaatcttggaggtaaaaaatatgtactcaaatgaagactataaatttatagaagaaaatgcaccatgttatatatatgatgagactaatataattgaaaaatgtaaggaattgaaaaataatattttaggttttgattttttatattctataaaaacaaatccatataacaaaattgtaaaaagcattgcagagcaaggttttggagcagatgcttcttcaactaatgaagttatgatttcatcagaatgtggagtttctaaatatgatatttattattcatcaccaggcaaaacagagattgatatagaaactgttttagataaatgcataattattgcagatagtattacagaaatagaacttataaataagatatctaaaaagcataatcagaaagttaaaataggaataagaataaatcctgattttactatggatgatgatagtgctaaatcaagcaaatttggtatagatatagaagatatgagcagtgtttttaagatgttaagtatgtgtgattatgtatctgtagttgggattcatatacatattaaatctcaggtattggattttgaaaagttaggacattattatgaaaaatgtttttttatagctttaaatttaaataaaagtaagtatattaatattgaatttataaattttggtagtggacttggagtagcttatgataatcttagagaaaatccacttaatcttaaagagctttcaaaattaactcaaaagattgtttttactaattcaaacacactgaaatcaagacttcttattgaatcaggacgtttcatagtttgtaaatcaggtaattattatgttaaaattgtagatattaaagtatcaagagggaaaaaatatcttattgtaaaaaatggacttaatggatttatgagacctattatttctaatttaattgaaaatattacttgtggagtagaattagaaggtcaagagccattatatacatcaaatcatgccttttctctttcagtattaaataatttaaaagaagaagagtatgtaaatgttgttgggaatctctgtacatcattagatgtaattgcaaataatgttaaattgaaaaaagcaaatataggagatttgatttcaattagtaatgctggaagttactcctattctttatcaccactattattttcgagttatgaatttcctaaacaatattataaaagaaaagatggatatattgagtaaacaataggataaattaataaacttagtattattgaaaaaatttaaaatgcagggggtgtaattctatatggaattgtggaaaagaaatttatttgtatgttggataggtatgttttttagttctatagggatgagccaaatagcacctatacttccattatatattaaacagttgggggtaactgatgttagtttaatacaacagtattcaggtataatttttggatgtacctttgtagtagcagcattcttttcgccaatttgagggaaagctgctgataaatatggaagaaaatcaatgcttttacgtgcaagtattgggatgggaatagttatatttaccatggcgtttgttcaaaatgtttatcagttattaggattaagaatacttcaaggagtttttacgggttatgctactgcatgtactactcttattgcaacacagacagataaaaatcattcaggatgggctttgggtactcttgcaactgcatcaactactggctcattaattggtccaacagtaggaggatatatagaatcaatcttgggtcttaaaagtacatttattataacaggaggattgttgtttgtatcatttatcatctctattttatttgtagtagataattttaaacctaaagaaataaaagaatcaatttctatacctaaagaacaattaaatatattgccaaataaatttttaattgcatctatttttgtaaccacattcattactcaactagctttatactctatagaaccaattgtaaccatatatatatcacaacttacaaattttgcatcaaatgtagctttaatagctggattgacattttctgcatcaggattagcaaatttattagcagctcaaaaacttggaaaaatgtcagataaaataggtcctcaaaaagtattgttaatttcacttttatgggctgggattatatttataccacaagcttttgtaaaaactgcatggcaactgatgttgttgagatttttattagggttgtcagttgcagggcttaatccttctgttaacagcttgcttaaaaaaattgcaccagaagaatatgtgggaaaaatatttggatataatgcatctgcccagtatataggttgttcatcaggagcatttttagggggacaaatatcagcacatttaggtattagaacagtatttttttcaacaagtttattgttgtttatgaatgcactttggatgtataaatttactggattgtttattaaagataagactaaataatcatactatttacatttctaattttatgatgtaaaataaatattttttatgtaatttatcatagaattatataaaaaataactctatggtaaaaattggaaaatattattatcgacaaaatctttgacttaaaaactatattgcgatagtattaatttaataaaagtttgagaggggcgtaaggttatgacaatttcaaaaataccacaagcagaattaaaagttatgaagtttatttgggaaaaaaatgatacagtaacatcaaaagaaactattgaagctatggaacgaaaatatggttggaaacaaacaactacattgacacttttatcaagacttgttaaaaaacattttttaagtgcagaaaaaatagatagatacactcattatacaatagttgttggacataaggagtatttaagtgttgagacaaaagattttttaagcaatatacacgacaattctttacagagtttaatttcagcactacatgatgatgaagttgttgataaagatatgttggatttatttgaaagtcattttaaaaatttagaagaagagtaattatatcaggataaaactctaagaatttaattaatctatggctgaaaaccataaatggtattatttaatcagctactcactattcataaagtaatattaaataggttctctaattagtaaaatacctaaaataattggaatagggagtatcaagttaaatgataccacttatttaaataagaaatgatttttaaaatttaaaataattttataacttgtcaatattcattaatctaaagtattatttctatttaaccatatcaaaatatattttactatttttaattattacaatataaacctgtcttttgttattataggtaaactaaaagtaagaaatgatttttatatttttaaactttattattggtaacttatctgtaaatattttaaaatgtactatagaaagttgttaaaaatattaaataattatattaaatttaagtgtgttttttatgctataattagtatgtattttttatgatatattttataaaaaatataatttaatcatttttgaggatattattatgttagatgcatttataacaattgtttcttctattatagaaatatggtcatgtaaaaaagtttttgattatactagtcagtcaaagaccgacttaaaaaaactaaatatgtattttctcttttctgtttttcttattatttcttctttatatataaatataggagctaatagtagaatcttgatatgtatatttgtaatgttcgttttctataagtctaactataaggttaatatatataaatgtctggtaatctcatttttttattggttaatattaataggtataaatggattaagtatgttattagtagcaacagtaagcaatttggataatatgaatgttttacttagtggcagtttatatagatatgaagcaatattcttgggaaagataatgttaggtatattactttatgtttataaggcttcttttaaaaattttaaaataagtaaaaaagagatatacatatgtattcctatgatagcaaatttattgtcattttttgtactttatgattatattattaatcttgtaaaaatctctcctgaaagaagaactgcttttttagtaatagttttactattaatattatctaacatttcaatctttgtattaatacatataatacttaagattaaaattaggaaaataagataaattttaatacgattcatttaaattaaaagttaataattacttttttatgtataattttacatgaatttctataaaagttattttattaaagatagatatacttatatatacggatatgattaaaaaaagtctttttaactttaaaaattaatgttaaaaaataaacttatacattaatattaataataattatttaaatatcttaagtaaatcagtcttacatatatttccgatagattatattgataaaaaacactaaaattaaattaataaaagtacttggagggatggaaatgaaagaggaaaattttattaatgttgaatacgaggataaacgtttttcaattaatagtaaagaagttttgtacatagaaaagcaagagtatgaagtaaagatttatactgaaagtggtaattatgaagttggagaaaatgctccttgtataagaaaactattgaaagaagaaaattttttcaaatgcagtaatagttatattgtaaatctagacaagtgtgaattttatctcagcaataattgtatttttgtgaataataattttataagaattttaggttcagaaagaaaaaagaaattaaaaaagaaattagaaaaattatatgattatgaagattaatattgggaggctgtattttatacagcctctttatttattgattgtattattaataaattttaaattatgataaaatataaaacaagtaacttatttcagaataaaatactttttaaaagaaagggacgagatatgggagattataataaaatgattgaattaaagaataacttaggtatcagtgaaagaaagttaaaatatccttgtatctataaacattttaaagggaaatattatgctacaatgggtcttagcaaggctattgatgatatagaaaacatatgtgaaatatatggtaaagaaaatttaatccaaaacagaaataaatataaattagttattagacatactgaaagagaagaagatatctatgtttatagggatttagatggaaacctttatcataaaaaagaagaagatactaatgatttagttttatacaagaccttatatgatgatacaggaatatttgcaagacctttggatatgtttttagaaaaagtagatacagataagtatgtcaattcaattcaagaatacagatttgaagaagtatataaataatataagagaaatatgtttataaatttagaaaaattctttaacagtacaataatttgcagaaatacaaatgagatttattgtaaataatatgttagattagattataaaatagaaacaaagtaaagtattatatgatataattaagttttgagaagtgataatttatatttaataaaaaataggcatatattaggaggacatatgggaaatactttttatatagtaagacatggacaaacggattggaatatattgggaaaaacacaaggtcatggtaattctgaccttacgcctcaaggtatagaacaggcaaaagaactttctgaagatattggcaagtattcaattgattatatttttagtagcgaccttgggagagcaatgcaaacagctcaaattttaggagataagctcaatattgaagttcaaaaaactgaggcacttagagaaatgggattcggagtttgggaaggccttttaataaaagaaattcaaaaagattattcagatatatatgcaacatggagaaatgaaccacacttagtaaatataccagaaggcgaaactcttaagattataaaggaaagagtagatgcttttataaaggaactaaatgaaaaatatgataataaaaatataattcttgttacacattcaattacattgagggttatgttgttgtcatttttagaatcaggtatggaaaatatatatagaattaagcaagataatactgctttaaatatagtagaatttaaagattatggacctgttatagtaaaaatgaatgatacaagtcatataaaaaatcatgtaaagataaataattctgcactggagtaggaatcaattataaggagaaatttatgagtaaagttatagtagttggtggaggagcttctggaatgatggcagctttgtcagcttcaaaaaacaataatgaagtaatattagttgagagaaatggagaattaggaagaaaacttagggcaactggtggcggtagatgcaattttaccaataatagagagatagaagatttttttgataaagttgtcagtaataaaaaatttctctatagtagtttctatacatttacaaataaagaccttatttcgtattttgaaagtagaaatttggaatataagattgaaaaagaaaatgaccacaaagtatacactaaaaatgataaatctatagaagtaatagaagtattaaataaagatttactcaatcacaatgtaaagataatgtataataagaaagttatagatattataactgaagaaattgctctaaaagatgattctaataaggacaagtcaaagtatctaataaaagggattattttagataatggagataagatactaggagacaaggttattatatcaactggaggagtgagttattcaaagacgggttcagatggttcaatgtataagattcttaaaaagcatggacatacattaaacaaactatatcctgctttagttccacttacaatagaggaaaaatggattaaagatttacaaggaatatccatgaagaatgtggaaatatcttgtaagattaagaaaaggaaaatatcaaaatctggagacatgctatttgcccattttgggataacaggaccttgtgttcttataatgtcttcttatattaacaagattattgaaaaggaaaaggtagaattaaatatagatttcttaccaaatttaagtactgatgaaatctctagtataatcagagcatttccaaataaaaatgttctaaataatcttaagcaaatactacctcaaaatttcttaagagagattttttctctattatctttagttgataaaaaggcaagtgatttgtctaaggcagatgaaattagaattattgagtatataaaaaatatgaagctaacttgtaatgggactacaggtataaacactggtatggttacttctggtggtatttcagttaaagaaattaattcttctactatggaatctaaattagttaagaacttattttttacaggtgaagtaattgatatagatgcagaaactggtggatataatttacaaatagcattttcaactggatatcttgcgggtataagtgtataaatataattttttaataattaaatatgaataaatagaggtgtatatatgggtaatttagttatagctgtagatggtccagcaggagctggaaaaagtacaatagccaagatagtagcaaaaaagctaaatataaattatatagatacaggtgctatgtacagagcagttacttataagtgtttaaaaagtggtgttgatgtcaataatgaaaaagaagttattcaaatagctgaaaattcggatatagattttaaagataacaatatatatttggacaaagaagttataaatgaagaaataagaacaatagaagtaagcaataatgtttctaatgtagcaaaaataaaagaagtaagacagttgatggttgaagttcaacgaaaaataggaatgaaaagttcagtaatactagatggtagagatataggttcatatgttttcccagatgcagattacaaattctttttagtagctactccagaagaaagaggaaatagacgctataaagaactttgtaataaaggatataatactactttagaagaagtaattgaggatataataagacgagatgaaattgattcaaatagagaatttgcaccattggtaaaagctaatgatgcactagaaatagatactacaggaaaaactatagaagaagttgtagaagaagttgtatctaaaataaatctttagttttttatgcatcataatgaaaataaatgtagtgttgaagggagataaacgtgaatttttatagatttgtaataaatatttttaagggtttttctaaaatattttttaaatatgaagttataggtgcagagaatattccagatagaggaaatatagtaatagcatcaaatcataaatcgaatcttgaccctatattcttggctgctgccatagaaaatagggaaatagctgcaattgcaaagaaagaattgtttaaagtaaagccattgggatttatattaaaaaaattgcatgttatgcctataaatagagaaaaaccagatgtatctacaataaaaactattttaaggtcagttagagatggttatgtattaggaatatttccagagggtactagaataaaaggagattcttttggtaaggctaaggcaggtctttctgtatttacaataaaaagtaaatctaaagttgttccagtatcaataatatctaaatataaactttttagtaaagtaattgtatatattggagaaccaatatcatttgaagaacattttaaggaaaaattgagtaatgatgaccatgaaaggatatcacaagagattttagaagtgataaaacaaaattactttaaatattcaaaataagggggtaaagttatgaacataaaaatagcaaaaaatgctggcttttgttttggagtaaaaagagcaatgaaaatggcatgggatgaagttgaaaaaaatgattctggcatatatgctttaggtcctcttattcataacaagcaagcagtagcaaaatatgaagaaaaaggtcttaagactgtgaatgaaattgatacaataccaaatcatgaaaatatgataataaggtctcatggagttcctgaaaatatatataaggaagccaaagataaaaaattaaaaattgtggatactacatgtccatttgtaaagaaaatacatacagtagtaagtgaatatcataataaaggctatgaaataatagttattggagatatgaagcatccagaagttataggtataaatggatggtgtgaaaattcagctataataataaagaccttagaacaaatggaaaatatggaatttaataactccaaaaaatattgtcttgttgcacagactacaataaatccagagttgtatataagtatagttaataaactatcagataaattagaagaaatagtatttaatgatacaatttgttcagctacaaaaacaagacaagaatcagctaaagagttagctaaagaagttgattgtatgatagttataggaggtaaacacagttcaaatactcaaaagttagtaaaggtttgtgaagacttagtaccaacttttgcaatagagactaaagatgaattggatgtaaatacgcttaaaaaatataaaaatttgggtattacagcaggggcatctacacctaattggataatagaagaagttgtaacattccttgaaaatttataatttgataggtaataaaaataggtggacattgttataatttatcataatatccacctttgatttcatattacatgtggtaaatagataacctaatatcaaaaagtgtgtatcttaagatgaaaaactaagagtataagatgcgcactttttaatattaaaaattcaaaagaaatattgatattgattatcaatagaaaatagaatataatataattgttgcaaaattagtctaggaggtaaattaatggaaatgttgatatccgcttctgaagaggcgtttttacatgtaggttctatgattggattttttattttgttatttggatatattaattataaaactagtggaaattttactaatatcatatcaaaaaacagaaaatttcaacccttaataggtgctttaattggagctataccaggttgtggcggaagtctggcaataatgccattgtatataaatggaaaattaagctttggagcaataattgcaagtttaatagctagtatgggagatgcagcatttgtacttatttcatcaaatattaaaatgtatttttttgtcactatagttagtacaattacaggaataataacgggacaattagtggattactttaaactagaagaaaaattagggttaaaaaaccgtagaaaatcagataaatatgatataagtaaaaataaccctaaagaaaataaagaacaacataatcatgatgaaataattttagacactctagctaaatctcatggaaatacaaatagacttgcatttataataacacatggaaagggatataaattttatataggaattatagtaatcggttttatatttatgtcacttgctcactctggacttaatcttcctataattgagaagttacattcattggaagaagtaatagcagtgattggaatattattttcaataatttatatgtggtgttttaaaaaggtatttaaaaattctaatcaaaaagaggaagaaaataaaaagatttctttgcgagaaatgcttatccattctgttggagaaatatcatttgtaattacatggatttttattgcatatcttatttacgatttgataatattaattttaggtggagatgaatacttagttaaactagtattatcaacaggtgtaataagtgtatttataggtgcaggtcttggacttattccaggttgtgggatacaaattgtgcttatgtcattttatttgaagggaactataccacttggtgcagtgatagccaactctatttctcaagatggagatgcacttttcccacttttagcaatggataaaaaatcttctttatgggctatgattattactactataccagcaatacttgtaggtatgatagtttatgcatttttaggttaaatataattacgaataaagaagtattaaaaaaataataaagcacataaatttatttataagaatagtgaagattaaatataaaaataaaaaattcaatatgaattaaattattgcttaaatattaatgagaacatgggagataatattattcctcatgttctctctatttaattaaaggaattatggaacaaatttcaagtgatactttctatcaaaactcatatataatatatattaataaattaaactataatacgtaatacagccagtatattgatataaaaaacttaggaggagttgtaaaaatgggtaatttaaaaagacagtgtgatgtttcaagtggaagagaaaaagctgacattgtactaaaaaatgggacaatcataaatgtatttacagaagagttaataacaggagatgtagcaatagtaggagacactatcgttggcattggcgattacaagggcaatgtagaaattgattgtagcaataaatatatatcacctggctttattgatgcacatatgcatattgaatctacaatggtaatgccaattgaattatcgaaaaaattattaaaatcaggtacgacaactatcatagccgacccacatgagttggtcaatgtaaaaggagctagtgcaatagattttttattagaatcgacaaaagatataccacttaatgtatatattatggtgccttcatccgtacctgcaacaagttttgaaactaatggagttggtaaatttagtgcaaaagacatggagagttatgtaaataatcctagaattttaggtttaggagaggtaatgtgttttaatgatgttataaattctgaaaatgaaatcttggataaactagagctttttaaaaataaagttgtagatggacatgcacctaatataaatggtaaatcacttcagacatatgtatgtgcaggaatagaaaatgaccatgaatgtataacttttgatgaagtatatgaaaaattgagagcaggattaaaaattttaataagagaaggaagcgcagcaaaaaatttaaagtctatagtaagtggtatgctaaagcataacttgccaattgaagaatttatgttttgcacagatgataagcacttagatgatatagaaaaacaaggtcacataagatggaatataaaatgtgcgattgatttaggtatggaacctgttagggctataaaagttgcaacttataattctgcaaaagcatatgggttaaggaaaattggagcaataggtgcgggttataaggcagatattgttgtattgaatgatttagacaaaatggaagtggatagtgtatataaagatggtaatttggtaaacgaagagatgttttctaattacaattatgagattaaagataaagaattgcttaatacagtcaagtttaagtatattaataaagaaaaaatacagttaaaagtaagtgaaaaaaattatgtaatggagattgtaccttatcaaattttgacaaataaggtatatgaatctttaccatgtgcagatggatattttgttccaaataaagagtattcaaaactttgtgttgttgagagacatagaatgactggaaatgtagcaattgcttcactaaaaggatttggcataaaaaatggagcaattgctactactgtggcccatgattctcataatattatagttgcaggggataatgatgatgatattctagtagctataaattacttaaaggaaatacaaggtggttatgtaattgtatcaaatggaaaagttcttgcacacctaagtcttcaagtagctggattaattagtacttttacagctgaagaagtacaagaaattactgataatatgttggagatagcaagaaaaatgggagttccagagtatgtagacccttttattacactttcttttatggcacttccagttgttccacaaataagacttacagatttaggtctatttgatgttgaggaatttaaatttatatagataatataaaagtaataataaatgaggctttctcaaaatagggataagtctctttttattgttgaaatgatgaaaatatatttgatttcatacaaaaaagagcatctaatgaactaaaaattttatttttagatatccttattttaattaatctatcatttaaccttgttttaagcatagatatcttaataaaactattttcagtctattttagaatataaatacatgaaaattatatatttatgaaactttatacataaaaaataaaatattttatttatatatagatttatagggtaataatataagcatagtataaaattattaataaaaacaaaaggagagatatttatgttgagtataggaacaaaagcaccagaatttacactagaagataaagatggaaataaggtaagtatgtcagattttaaaggcaaaaaagtagtagtatatttttatcctaaagataatacaccaggatgtacacgtcaagcttgtgcttttagaaatgcatatgatggatttaaaaaggaagatatacaagttattgggataagtaaagatagtataaaatcacatcaaaaatttgcagaaaagcatgaacttccttttattttactttctgaccctgacttagttgctataaaagcttttgatgtatggaaagagaaaaaaatgtatggaaaaactgcattgggagttgtacgtgcgacatatattatagatgaaaatggaattattgaaaaagtctttgaaaaagcaaaaccagacacaaatgcacaagagattcttgaatatttggaaaaacaggagtaataagaatttatgattataatgttatcaccagctaaaaatatgaagaatatagaagtatttgatagagatttgagtttgccttgttttatagataacacaaaagaaatagtggaaaatataaagacatttggtatagaagattttaaaaataaaatgaaaattaatgaaaaattagctgtattaaataaaaatagatttgaaagcattaaatttgatagattaggaaaccctgcaatcttaacttatgatggaatacaatataaaaatatagaagcagaaaattttacaaggaaagatgaagagtttgcaaatagctgtattcgaatcataagtggattgtatggtgttgtaaaaccatatgatagtatatatgaatatagattagaaatgcagacaaaattacgagtaggtgagtttaagaatttatacgaatattggggaaatcgtatatataaagaactaatcaaagaaaaaacagctatcattaatctttcatcaaatgaatacagcaagtccatagaaaaatttattaaagatagtgatacatatattacatgtacttttaaagtaaataaaaatggcatattgaaagtggaatctacacaagcaaagaaagctagaggtatgatgacaaaatacattgtaaaaaataggataagagatattgaagaactgaaaaagtttaatttagaaggttataagtataaagaaaacttatctaacaatagtgaatacatatttgtaaaagagtagaagttttgttaaatattaaatggcattgttaaatttaggtaaaatatacttagtgtgtattgaattgaacttgattttaaaatataattattcttaaattaaaaaaagaaaggagtggtcttccaaaatggaaaatcacaaacagatgccttggcattcaagagcaacgcatgaaattttagaaagtctagattcatcagaggaggggctcaccgataccgaggcggaaaaacggcttaaagagaatggcttaaatgaacttagaaaaaaaccacctagaacaactttacaaatgctttggagtcaaattacagatgctatggttatgatactaataggagcagcaatattatctttgatatttggcgaatttacagaagcttttgtaatactaataattgtaacagtaaatgcagttattggaattgttcaagagaaaaaagcagaatcatcattagaagcattaaaaaatatgaactcacctacagctcgtgttatgcgtgatggtgaagaaaatgttattccagcaagtaatcttgtagtaggagatattgtttttttagaagatggagctatggttccagcagaccttcgtttaatagaaacatcaagtttaaaaattcaagaggcttctttaacaggagaatctgttccatcagaaaaagatgcagatacaatcttacctaaagaatgtgtattaggagaccgtagcaatatggcgtatacatcttcaatagtcacatatggtagaggtgtaggtgttgtagtagcaactggtatggatacagaagtgggtaacatagcacatcttttagattcacaagatgattttgatactcctataaaacgtaaacttaatactgttggaaagacattaagtgtcataggtattattgtatgcgttgttatatttgcaataggtgcattttatcagagacctctcttgccaatgtttatgattgcaatttcccttgccatatcaattattccagagggattacctgcaacagctactattgtaatggctttaggcgtacagcgtatggctaaaagaaatgctttaattagaaaattacctgctgttgaaacattaggaggagctacagtaatatgttgtgataaaactggtacattaaccttaaataaaatgactgttacacatattgctgtcaatggagattttgaatctggaaaagtgacatcaatagatactgcatctgaaaaacatccattagtgtataaagagattgtttatgctggtgcactttgtaatgatgcatgtattaatccagataaaacagatgaaatattaggtgacccaacagagggcgcattaatttttatggccaaaaaatttggaatagatcaagaagctcttgaagaagaatatccacgtgtatttgaacagccttttgattcagatagaaaatgtatgacaactgttcataatatagatgaaaagattattgcttatactaaaggagcagtagacgaaattctcgacctatgtactaaaatattaacttcaaaaggtgaaagaaacattaccgaagtggataaaaagaatatacacgaattatgtcttaacatgtctaaagatgcattgcgtgtacttggttttgctaagcgtgagatttcatctataccaaaagaagatagtgaaaatatagaatatgatttgacatttataggtatggttggtatgattgacccaccaagaactgaggtaattgatgcagtaagtacttgtaaagaagcaggtataagaaccataatgataacaggtgaccataaagttactgccacaacaatcgctcatgagttaggaatatggagtgaagaaaatactgtgatatctggtgatgaacttgataattttagtgatgatgaactagatgaagctgttaaaaatactacagtatttgctcgtgtgtccccgtttgataaacttagaattatacaatctctaaaaagaattggagaagtaccagcaatgactggggatggtgtaaatgactctcctgccttaaagtctgctgatattggtatagccatgggtataagtggtacagatgttgcaaaagattcttctgacatgattttaatggacgatagttttacaacaattgcttatgcaataaaagaaggtagacgtgtatatagaaacatacaaaaagttatacaatttttgcttgttggtaatatagcagagatacttacgttgtttgtagcaatattattaaattgggatactccgcttcttgctgttcatattctatgggtaaaccttgcaactgctacgcttccagcccttgctcttggagttgacccaccaagcagaaatataatgaagcaccagccagtgaaatcaaccactttgtttgaaaaaaatcttatacaaagagttgttacccaaggtatatttgtggcaataatgactattttagcatataaaattggtcttaatatagaaaatcattctgtaggtcaaacaatggcattttgtgtattagcattttcacagatgttacgagcatttagtcagcgttcaaatacagattcaatgtttaatagaaataatggtaaaaatccatttcttttaatctcatttttaacttctgcatttttaatagcagtaatactgtttgtacctgtttttagaaatgcttttaacttaacagttttaaataacttagagtggcttataacgattgttttagccataatgtctgtaattcaagtagaggttgggaaaattattaaaagaaaaaaaagaaaaaaatagttgacaaaattaggaaaaatatataagatataaaacatagaaaaattaaataaatcttatccagagaggtggagggactggccctatgaaacccggcaaccagtatatttatatacattggtgctaaatcctgcggcgaaagctgagagatgagtataattaagcttatacagagcctgagttatatactcaggctttatttattttaactctcatctgataaatagtttaattttttttactaaaatctaagggggatacaagaatgtataataaagaaacaatatgtgtgcaaggaaattataaaccaggtaatggagaaccaagagtattacctttatatcaaagtacaacttttaaatatagcagtatagaccaacttgctgaattatttgatttaaaagttgatggacatatatattcaagaataagcaatcctactattcaagcttttgaagaaaaaataagtttactagagggtggagtatcttctgtagctgtatcatcagggcaatctgcaaatatgttggcagttttaaatatatgtaaatcaggagatagtatactttgttcttcaaaagtatatggaggaacattcaatttactaggacctagtcttaaaaaatttggtatagatttaatatcgtttgacttagattcaagtgaagatgagatagtagaacttgcaaaggaaaatactaaggttgtatttgcagaaacacttgcaaatccgactcttgaagtcatagattttgaaaaaatagcaaatgtagctaagagaattaatgttccatttattgttgataattcattagcatctccagtgctttgtaaccctttaaagtatggagcaaatatagttactcattctaccacaaaatatttagatgggcatgcttcaagtgttggaggaattatagtggatggtggaaactttaactgggataatggaaaatttccagaattagttgagccagacccaacatatcatggaataagctatactcaaaaatttggaaatgccgcatatgcaactaaagcaagagttcagttgcttagagactatggaaattgtttaagcccattcaatgcgtatcttactaatttaaatgttgaaacactacatcttagaatggagagacatagtgaaaatgcacttaaaatagctagatttttagaaaaacatgaaaatgtagattggattaattacccaggacttgaagataacaagtattatgagaatgccaaaaagtatttatcaagaggatgtagtggtgttttatcatttggagtaagaggtgggttagaaaatgccaaaaaatttgtggaaaaattacagatagcatctttggttacacatgtttcagatgtaagaacttgtgttatacatccagcttcaactactcatagacaattaacagaagaacaattaattgcatctggagtattgccttcactaataagattatctgttggaatagaaaatgtagaggatttaatagctgatttaaatcaagctttaaatttctaatattctaagagaaagagaagtgaaaagatatggctttaatactaccaaagggattacctgttattaataaattattagatgaaggaatagatgtaatttataaagaagattttaaaaaggaattaaagtatgaagaaaacatagacactaaaatagctatactaaatctaatgcctataaagatagatacagaattagatttactaagaaggatagataaaacaggattcaacgtgtctgttgaatttattaaaatttcaacaagagaaagtaaaagaagttgtaatgaatatgttaaagaattttataaaacatttgatgaagccaaaggagagtattttgatggctttataataacaggagctccagttgaacaaatggagtttgaagaagttgattattggaatgaactagaagaaattatggattattctaagagaaaaactaaatctacattatatatatgttgggcagctcaagcaagtctttacaaatactacaatgtaaaaaaacttccactaagtcaaaaatgttttggagtatttaagcataaggtagataaagatagtaaaatagtagatggatttgaaaatgaattttttgctccacattcaagacatactactgtaaatattgaagctttgaaagagaataaagagttgagcattgtgagtcattctaaagaagctggtccctatataattacaaattcaagagatgtgttcgtaatgggtcatagcgagtatgacaaatacactcttgataaagaatataagagggatataaataaaggagataaaatatctatacctcaaaattactatattaatgatgacccttcagaagagccaactgtaaaatggaaaaaacattcagaattgttgtttagaaattggataaaaaactatttgatacaataaattttaagagtatataaatgttaactaaaaaaatatagaaatttataggtataaagttaatcttaatgatactttataccttattttttttaaatttaaccttataatagtagttttatattttaagaaaatcactttaggtgtatgtagatagaggtggttttaattttatatatggtgcgataatgggagactaaacctttatagtatcaataaatttgtattttaacttttaaaagagattaaaaagggagaaatcagtgtaaaatatatatatcgattttttattaaattttattaaaaatatcctgtataaaattaaatatcaataagataacaaaattccaattgaagttacaatattgtaattgacaataaatacttaatactataatatttaatacattaaacattatagtattaagtatttatttacagtatgcacttcagcctaaatttgaaataaagtattttcgtagggagcgtttgtatggatgagatgagttttaagaaagagctactagagttgactagagatataaatatgaaatttacaactttattaagtgatttttatcagccacttggtattacagcagtgcaagctttgattttatctgagttatgtgaacatggagagaaaaaaataagcgatttagggaagaacttaaacatgacaaatagtaatgtatcagtaatctgtcaaaggcttgaaaaaaatggctttttaaatcgcataagagatatagaagaccaacgaattgtaaaagtaaaagttacaaataaatcattggatatacaagaacatatttcaagtagtatttttgatagttattttgaaaatatgaccagtgaaaaattgcaagatatggaagatataatagaaggtttagagaaattaaataaacttttaacttacattgattgcaaataacataaaaataatttaaaggagaataaaattatggatgaacataaaccccaaaaaaggtcagcactctattattatacagttataataatagtagtaatgtttttaaatgctttaatatttccaagtttaatggataaaaaaatggttgagattgactatggaaagtttctcacaatgttggatacaggaaaggttaaatctgttgagatagaaaataatagaatagcaataaatccatctagtagcaaggataagaatatatacataactggtagaatggatgacccagaattggtagatagactaaaaaatgcaaaagtagaatttactaaggttattcctaaggaaaattcacctcttttaagtattttacttacatggataatacctataggtattcttatgctatttggtaacttaatgatgaagtctatgcaaaagcgaatgggtggtaatgctatgcaatttggaaaaagcaacgccaaaatgtatgtatctgctcaaagtggaaaaagatttaatgatgtagctggtcaagatgaggcaaaagaagctttaactgaaatagtagatttcttacacaatccagaaaagtataaaaagataggagcacaaatgcctaaaggagcacttttagtaggacctccaggtacaggaaaaacactccttgcaaaagctgtagcaggtgaagcaaatgtaccatttttctcaatatctggttctgagtttgttgagatgtttgtaggaatgggagcttctaggattcgtgatttatttaaacaagcaaaagaaaaagctccatgtatagtgtttatagatgagattgatactattggtaaaaagcgtgataatggaagtggattaggtggaaatgatgaacgtgaacaaactttaaatcagttgttaagtgagatggatggttttgatggtggaattggagtagtaatacttgctgctacaaatagacctgacagtcttgacaaagcattacttcgtccaggaagatttgatagacgtataccagttgaacttccagaccttggaggacgtgaagctatattaaaggtacatgctcaaaatgtaaatgtaagctcagatatagattataatgcaattgcaaggtctacatcaggagcatcaggtgcagaacttgcaaatattgtaaacgaagcagcacttttagcagttaagtctggcagagatatagtagaacaacaggattttgatgaatctgttgaaactgtaattgctgggtatcaacgtaaaggagctgtaatttcagataaggaaaagaaaattatagcatatcatgaaataggtcatgcacttgttgctgctatgcaaaaacattctgcacctgtccataagattactataatacctagaacttcaggagcattgggatatactatgcaagttgctgaagatgagagtgtacttatgtctaaagaagaagcaattgataaaataactacttttacaggtggtcgtgctgctgaagaggttatctttaacacttgtacatcaggagcatcaaatgatatagaacaagctactaaaattgcaagagctatggttactcgccttggtatgagtgaagagtttgatatggtcgctcttgaaactgtaagcaatcaatatttaggaggagatacttctcttgcttgttcttccgacactgctgctaaaatagatgaagaggtatttaaaatagtaaaggcttgtcacaaaaatgcaattgaaatcttagaaaataatattgataaattgcatgaacttgctaattatttattagaaaaagaaactattacaggtgatgagtttatggaaatacttaacttaaactaaaatgattatacacaagataaaaatgcctattgttaggcatttttattttacaactaaattttttaaattcatatttaaatctttacataatcttaatcattaaaaatacatcttaactacaattttatatcggaattgatattataatagtaatgaatggtgtaaggaggttttttaatggatagacctaatcctgatattctattagaaaaaattaaaaatgaagaagaaaaactaagtagaggtcaattaaaaatattctttggttatgcagctggagtaggaaaaacctactctatgttggaatctgcacaaaatttaaaaaaagtgggtgtagatgtagtagttggatatattgaaccacacactagaccagaaacattggctctacttgatggcttggaaattcttcctgtaaaggagatagaatataaatctataaaactaaaagaatttgatttagatgctgctttagcaagaaaaccagaagttatattagtagatgaatttgcccattctaatgttgctgggttaaggcatacaaaaagatggcaagatatagaagaattgctgttagcaggcataaatgtctacactactgtaaatgtacaacatttagaaagtctaaatgacattgttgaggtaattacaaacgtatcagttaaagagactataccagataagtttttggatacaaatacacagttagaacttatagatgttgaacctgatgtacttcttgaaaggttcaatgaaggtaagatatataagaaagaacaagctactagagcaaaaaataatttttttataaaagataacctggttgcacttagagaaatcgcacttagaaaaacagcagagagagttaataaagaagttcaaatgaccagactatcaaagggtgatgtaactgtaatacctacatcagatacacttcttgcatgtataagtccatctccatcttcagcaaaagttattagaactgcatccagaatatcagacagtacatttgcaaaatggatagctttatatgttgaaactccaaacacagcaagacttccatttgatgaacaaaaacaactacaaaataacctaaaattagctaagaaattaggtggagaaataattgttttacatggtgaaaatataatagagcaaatacttagaattgcaaaactgagaaatgtaacaaaaattgtaataggtagaaatcattcaagtaataaaagatttagtaaaagatttaaaaaagatatagttgacaaattaattgatgaagttgattatatagatatacatataattccatataaatttgcctcagatgttaaatacaaacctaaaaaggataaatcatcaataaaatctaaatttaaaattagcaaagttgattttataaaacttatatttattactttgatgataagtattttagcatatgcagtacaaagcatgggatttataagagaaaatatattgttaatatatatgttgggtgtagttttagtttctatgtggactaaagggtatagtacaggtataataagttctgtatttaatatagttcttttaaattatttttttacagcaccattatatacattatctatagcagattcaaactatatagtaacactggttgtattctcaatagtaggtataataactagcactcttacgtctaagatacagcatgaagcagaaactgctgctaaaagagaagaaaatacaaaaatgatatatcaaataattaagggatttttaagattatcaagtaaagatgatatagtaaacaaaggtatagaacttttgtctcttagcttaagtagagatgtaatttgttatttaaatgtagataagcataataaatcaaaactttacaaaaaaaatactaataataaggataaaaatgatttggatagtgaagatgaaaaagctgttgcaagttgggttttatccaattcaacagtggcaggaaatgacacggatacacttcctggttcaaagggatactatataccaattgtaggaatgaatttaactttaggagtagtaggaatatcatgtattgattcaaaattggatacagaagatataagcttaattgaaacaataattgctcaaatggcaatagcgcttgatagagaaatcttgtcagaagctaaagaaaataccaatcttgagattgaaagggaaagattaagaagtaatcttttaagagcagtttcgcatgaccttagaactccactagcaggaatatctggtgcagtaagtacaattataaaaaacaagggtactataggtcaagatataatagatgaattacttagtggtgtatatgaagatactcagtggttaataagacttgttgaaaatttacttagtatgaccaagatagatgaagggaaattggaagttaaaaaacattctgaactggttgaggaaattatatcagaagcgttacaaaaaataaaaaaaagaattgaaaatgcacttatagatattaatataccagaacagatattatttgttcctatggatgcaaaattaatagaacaagttttaattaatttaatagataattctttgaaatattcaaaggaagattgtaagatagagataaatgtatacgagaaagatgattatgtttggtttgaagtatctgataatggtcctggtatatcaaaggaacttaaaaagcatatctttgacagattttttactggagaagaaggagctaaagattccagaaagggtgttggacttggattatcaatttgtaaatctataattcaagctcataaaggtgaaattatggtagaaaacaataaagataagggttcaacttttaagtttagtttgcctaaggaaaatgaatagttttaaattttaaaattagttttggaggaagaaatgagtaaaaaacttatattgttagtagaggatgataagacaataagaaaatttatatctactgcacttttaacacaggattatgatgtcaaggaggctataactggaaaagaaggtatatctattgctgtctcatattctccagatgttgttcttttagatttaggcttagaagatatggatggaatagaggtaataaaagctatcagacaattttcaaatataccaataattgtagtttcagctagagagcaagatagagataaggtagaagtatttgatgcaggggcagatgattacttaacaaaaccattctccatagtagagttattagcaagagtaagagtcgcatttagacattcacaagtagaagctcaacaaaaagatgatgttaaatctacgtttgaagtagataaattattgattgattttgataaaagaaaagttattgttgatgatgttgaagtccatttgacacctattgaatataatattctttcattacttgcaaagcatcatggaaaagtgcttactcataattttataataaaagaaatatggggtagtgttatagggaatgagactaagtctttaagggtctttatggcaacattaagacgaaaaatagaaaaacaacctgcaaacccaagatatataattacagaagttggtgtaggatacagattaaatgatgaatagttgtaatatattaattattagattatgtgcttattaatatatattaaaattatatagtttagttaaaataagaatgaagtgtatgtgcttgttgtcagtttagcacatgcattttattttttagctttttagtatcaataatatgaaatatgttttaaaataagtatatagtgtaatctgtaataaaaactttggttaaataataaatgtatttaacacttaccttataataaatttaatgtaaatattaaataataattgttaaaatagtgtaaaataattacagtaaggattataaaaaatttttagaatgtaaattgaaatttaggagtagatgtatgtatatactgaatttaaatacaagagagactattgaagattttagagataaattttatgtagcagaaaattcttatcttatattaagtgctccaaaaaatttaaaattgcttaaggaaactttggatatagatgaaataacttttaatgattgtcttaaatttgatgaaataaccaaacttgatttatttgataattacgattttttaagcctaaatacatttgaactaagagatggagaagctgttatagaagaagtaaatatgtatttatcagataattttatattggttgtagtgaatgaagaacactttttatttgaatttgtaaaaaatattattttgaagaactctcaacttgaaaaaaatccagttattaatctatttaagataaactacttgattcttagagaagttataaaaaatggttttgagtctttggaaaaagttgaagagttaattcttcaaatagaagatgaaatgatggacaacattaataagaatcatgtatctagaataagtgatgtaagaggattaacaagaattatagttaagaatactagacctcttttgtatattggggatagaatagttaaggaaaatataagatatttaaaatattcaaatgtaaaaaaatataatttagaaaattttcaaggtatagattttggaattgacaaattatacaatttcgcattgtcaacacgagagttagcagataaattattagatatttattcttccagagtaggtgagaaaacaaataacttaattacaaaattaaccttgttaacagccatatcagcaccacttacaattataactggtatatatggaatgaactttagatatatgccagaattaaactggatttatggatatccagcaactttattttttatgctatgtataatttttattggaattataatatttaaaataaaaaaattattgtaaattacagatgatgtttaattgattttataaaaatacatcaattgagaagctgatttaagtaaataaaaaaatattttaaattgaaaatatttatagaaaatattgacaattatattttctttgttataattattaaacaagaagaataataaattataaaaatggaggataatactatgaaaggaatattaaaagaactaacagcaaaactttatagctttttttactttatgttctggggcttttattttagcgctggctatttcttttacaaaaatatatgtacttcctttctggtgaggccttattttagtgattttgagcataagtaaattttataaaaatgattattttatatatttatataagatttagtgcttgatagattattttagagaactcattagtgagttctcttttttattttaaatataaaattataatattgggaggtagtaaaaatgatagtagtattaaaaatgggagcagataaaaatgaagttaaaaaattaattgaggctattgggagagaaggagtagaagttaatcccatagatggaacagaattaactgttttaggtttagttggagatactagtaaaatagatgccaaaagaatagaagcaaataagatagttgaaaaagttatgcatgtagtagagccttttaaaaaggccaatagaaaatttcatccagaaccttcaatcataaatgttaatggaatggaaattggttcaaagaaaattgctatgatagctgggccttgttctgttgaaacagaagaccaaatagtatctatagctaaagatgtgaaaaaatcaggtgcaggatttttgagaggtggagcattcaaaccaagaacatcaccatacgctttccaaggattgaaatatgatggattggatttattaaaaaaagcaaaagaaaaaacagggcttcctatagttacagaaataatgtcaacacaagatatagatatatttgaagaaaatgtagatgtaattcaagttggagctagaaacatgcagaactttgatttattaaaagaattaggtaaaacaaataaaacaatacttttaaaaagaggattatctgctacaattgaagagtggctaatgtcagcagagtatataatggctggaggaaatgaaaatgtagttctttgtgaaagaggtataagaacttttgaaacatatactagaaatactttggatttaagtgcaattttagctgtgaagaaacttagtcatttaccagttatagttgacccaagtcatgcagcaggtaaatcatggatggttgactctttatctaaggcagcaattgcagttggagcagatggtctaataatagaagttcataatgacccagcacatgcactttgtgatggaaaacaatcgattaagccaaatgaatatgatgaattgataagtgaattaaagactatcgcatcagcagttggtagagaaatataatctataaaaggatggttaaacgtggaagaaaaactattagtaaatttaaaagaaaatagctacaatatatttattaaaaaaaatatactaaagaatataggagaagaaataaaaaaaatatattttggaaataagatttttattgtaactgatgaaaatatagcaaaattatacttggataaagtaaaaaataatttaagtgaatctggatttgaaattaaatctttaatattaaaatctggtgaagaaacaaaatcatttaatactcttcctaaaatatacgatagtttacttgactttaagttaactagaaaagatttgattattactttaggaggaggggtaataggtgatttaggtggatttgcagcagcaacttttttaagaggtataagttttattcaaattccaacatctttattagcacaagttgatagttctgtaggtggaaaagttggagttgaccttgagagaggcaaaaatttagtgggaagcttttaccaaccaaaagctgtgtttatcgacccaaatgtattattatcacttccagaaaaattctatagagatggaatggcagaagttataaaatatggatgtataaaagacaaaacttttttcaataaacttttaagtttaaaaaatagagaagaagtaatgcaacatatagaatacattatacataaatgttgctttattaaaaaaactgtagttgaagctgatgaaaaagactttggagatagaatgcttctaaactttggccatacattaggtcatgctattgagaaatactacaattttacgggttatacccatggagaagctgttgccataggaatgtataagataactttagaaagtgaaaagataggaattacaaaaaaaggtacatcagaacttataaaatcaattttaatgaattataatttgccttatgagattgaattaagagataataaatctatagtagatgctatatctcttgataaaaaaaatctaggtgatacattaaaaataatacttttaaaagatattggagagagtattatatataatactacttctaaattttttcaggaggtaagataatgggaagtctaaaaatatatccaagtaaattatctggagatgtaaaaataccaccatcaaaaagtatggcacatagggcagttatttgttcatctctaagcaatggaaaaagtagaatttctaatatagatttttctgatgatataatagctactataagagcaatgacatcattaggagctattatagaaaagaaagaagatattttagaaatttcgggaattttttctaaagaaggtattttaaatagagagaatcagttgaatcaacctaaattgacaatagattgtaatgaatcaggctctacattaagatttttagtacctatatctttagcatttgatggtgtaaaaaggtttataggtagaggtaatcttggaaaaagaccacttgatacttattatgagatatttgacagacagaatataaaatatagttacaaagaaaatcagttagatttgattatatcaggtaagcttaaaccagatgaatttagagtaaaaggaaatataagttctcagtttatcacaggtctattgtttatattgcctacactagagagtgattcaaagataataattactactgagctagaatctaaaggatatttagatttaactctttcaacgataaaagattttggggtagaaattataaacaataactataaagaatttattataaaaggaaatcaaacgtataaagcgagagattataaagtagaaggagattattctcaaggagcattttatttatcagcagatgctataggagaagatattagcatattagaccttaaagaagattctcttcaaggggatagtgaagtagttgaaattttatctaggatgggaatggaaatattaagagaaggcaacaaaataaaaggaataacaaatggtttaaatagtactttgatagatgcatctcaatgcccagatataatacctgtattatctgtagtagcatccttaagtatagggaggactacaataattaatgctggtaggcttagaattaaagaatgtgatagacttcatgcaataaatgttgagttaagtaaacttggagcaaatatagaggagaaagaggatagtttgataatcgaaggagtaagcaagttaaatggtggagtagaggtgtggagtcacaaagaccatagaattgctatgacacttgcaattgcttcttgtagatgtgataaaccaataatattaaaagattttgagtgtgtatcaaaatcttatccacatttttttaaagattttaagatgttaggaggtcgaattgatgagtggaatatggggaaataatttaaaagtatcaatttttggagaatctcatggaaatgctataggtataaatatagatggtcttccttcggggattgaacttgaccttgataagattgataaagaaatgaagagaagagcacctggaaaaaattctatatctacttcaagaaatgaaagtgatataccagaaattctaagtggatattttaatggaagaactacaggaacgccattatgtgcaatcataagaaatagtgatactcgttcaaaagattatggagagcttaaaaatttaatgagaccaggacatgcagatttcacaggtaatgtgagatattctggatttaatgactatagagggggaggtcatttttcaggtaggataacagctccattagtattttgtggggctatatgtaaacaaattttatcacaaaaaggaatagagataggagcacacataaaaaaaattaaaaatatagaagatatgagttttgattatgtaaatatttcaaaacaacagttatcaaatttgcaaactttggaactacctttacttgatttatcaaaggaagaagccatgaaaaatacgattatagatgcaaaaaatcaaagagattcagttggtggtataattgagtgtgcagtagtaggtattaatgtagggcttggaaatccattttttgactctgttgaatctactttatcacatttattgttttctgttcctgccgtaaaaggtgtagagtttggtttaggttttgaacttgcagatatgtatggctctcaaagtaatgatgaaatgtattatgaaggaaatcaagttaagagcaaaacaaataacaatggagggattataggagggattactactggaatgccaataattttcaaagtggcaattaagccaactccttcaattagcagacaacaaaacacagttaatataaaagataaaaaggacgatattttatatattaaaggcagacatgacccttgtatagttcaaagggctatacctgtaatagaagcagtaacagccattggaatttttgatttgatgaaaggacgataataatggaggatttaacgagatatagaaatgagattgacaatatagataaagagattattcaattatttgaaaagagaatgaatacagttcttgaaattgccagacataaaatgaaaaataacactactatacttcaaaaagatagagaagaaaaagtactaagtagagccatagataatttagataataaagcatactcacaagaaacggtacagttttttaattctataatggaaattagtagaggattacaaaaaagattgatagataatgatggtgagcagaaaatcgagtttagtttagattcatcaaataagaaatttgatttgtcaaatgtaaataaatataagtctttaaaagatgaattaaataaaaaaaatatcctagtaggatttccaggaaaatcaggttcatttacagaagaagcactaaataaattcttcaacaaaacaatatcaaaaaaacaatttaaagaatttgaagatgttttcatagcacttaaaaataaagaaataaactatggaataatccccatagaaaattcatctacaggagctatctctgaaacttatgaccttttgagaaagtacggtttttatatagttggagaagaatgtataaaaatagaccaaaatttaatagggataaaagacacaaaacttgaagatataaaagaaatatattctcatccacaaggtataggacaatgtagtgaatttttaaaacaaaatagtacatggaaattgataccatttaataacacagcaacaagtgcagaacttgtaagaaaacttcaagataaaacaaaagcagcaattgcaagcaaaaaagctgcaagtatttatgaattagaaataataagtccttgtataaatgatattgcaaacaactatacaagatttgtagtaatcagtaatcaaatacacattgaagaagaatcaaacaaaatgagtgtagtattttctgttgaacatgaagcaggaaaactttataaagtacttggatactttgctgaaaataatataaatatgacaaaaatagagtcaagacctatgaaaaatgcctcatggagatatttcttttatatagattttgagtgttctatatacaattctaaagtgtacgacttattagaattgatagaacataatacagcatattttaaatttatgggagtatataaaaataaaactgaatagataatataaatttttatttaatttataattattaggaggtgtaagtatgaattttttcggtctagtaggtgaaaaactctctcacagtgtttcacctcaaatccacaagagaatattcgagatattgaatattgaaagtgcttataaaaactttgaaattccaaaagaagatatatctaagctagacggtgctataaaattattaggaatacaaggagtaaatgttactgtaccatataaggagcgtattatgaaatatcttgattttatatcaccagaggcaaaacgtataggagcagttaatacaattttactcagagaaaatatgttatatggttacaatacagattactttggtcttgatagtatgtttaaaatggctaatattgatgttcaaggaaaagtagcagttatattaggaactggaggtgcttctaaagctgctcttacatattttattgattctggtatagaaaagctttatgtttcaactagaaaaaaggatgataaaaaattattaaatagtaaagctatattaatagattatgaagaacttaaacatataaaaggagatataatattaaatgctacaccagtaggtatgtaccctaatgtaggaatttcaccagtgtcaaaatctattatacaaaattttgatatattaatagatttaatttacaatcctggagaaacagagtttttaagaattggtaatagtatgggtaaaaaaacttgtgatggattatatatgctggtagggcaagcaataaaatctcaggaaatttggcaagatactaaaatagataatagtattttagatgttatatataatgaactaaaattagaatttttgtaagggagattgtcatgataaataaaacaaaagaaaaattgatattaataggtatgccaggtagtggaaaaactacaattggtaaacttttggccaaagaatataattgtagtttctgtgatatggatgattatataattcaaatatctcaaaaaagtatagcagagttgttttcagaaggagaagatatctttaggaactatgagactcaagcatgtagagaactttctataagtgataaaacagtgatatctacaggtggaggtgtaataaaaaaggatgttaatatggaaatactaaaagaaacaggtataataatttttattgatagacctatacaaaagattttggaagatataaatattaattcaagaccattattaaaaaacggaaaagatagattgtataatctttataatgagagaataaatctttataaaaaattttcagatatagagattttaaatgataaatcattaaataatgctgtatataatattacaaatgcagtcagtgaaaattttaaatttgactttaaagaaaaataatctagggggaaataaaaataatgaatattgttattgtaggactaggagttataggaggctcttttgctaaagcattaaaaaaagctggatatgaaaatgtatttggagtagatgtagatttagaaactttaaaaaaagcagaaaaagcaaaaatcataaaaaaaggatgtactacaggtaaagagttatttaaaaaagctgatttaattatactatctatatatcctagattagttgtagattttctaaataataataaaaacttttttaaaaaagggactataattactgatactacaggaataaaagaaacacttatcaatgatgtgttgcaaattattccagatgatatagattttatatttggacatccaatggcaggtagggaaaaaaagggtattgattttgcaagtgaacaagtttttaatggcgcaaattatataattactccaactggcagaaacaacataaaaaatttagagttagttgaaaatttaattttagagattggatttaaaagagtaaaaaagttaacttcacaaaaacatgatgagattatagcttttacttctcagttacctcatgttatggcagttgctcttataaatagtgatgaagaaggtagagatacaggtaaatttattggagatagttatagagatttaactagaattgcaaatatgaatgaagacttatggagtgaactttttttaggaaatagagataatttactaaaagttatagaaaactttgaatcagaagtaaatttagtaaaagaagctatatttaacaatgataaaaataaattgatagagtattttaaaaaatcatcaataagaagagaagctttagaaaaataaatattaatatttaagctatatatagatgggtataaatgtaagcgatagtgtatttaattgtattaataaatatggattcaatataattaaatatgctattgatatatttgtacccttaactattgttatcttttaaatgataatgatatttatttaaatgctctttattaacaatttataaaacttaattgtaaaaaatacttattaatagtaaaataaagtgaatcaattatattataattgctaaagagagtgaggtgtagctatttgaaaaaaaatagattaataataaagaatatatcaatagcatttatagtactattcttttttagtgtatttacattcttttatataggtaatattagtagagtattagaatatgaaacaaatgacataatgacagttacaattactggatggattatactttcatttttatttttatgtattataatttacatattatattcaaaagcaaagagtcaaaaaactatagaaaaagtagcatatacggattttgtaacaggttattccaactggagaaagtttgaattagatgttacaaatttattaaagaaaacatcacaaaataataaatatgcaatggtcatattcgatattgataaatttaaagcaattaatgatatatatggacataaaaagggcaatttaatattaaaagatattgcagatactttaaatgaattgactaatatcaatgaaacttttgctcgtgtaagtgctgataattttaatatattattaacatataacaaaaaagaggatataataaatattattaaaaaaattatagcaaataatgaacttgtaaacttatcttttggaatttatgaaatcaaagataaggatttatctgtaagtgtatatagtgatagagcttcacttgcaaaatcatcaataaaaaataatagtgatgtaaattttgcattttttaatgataaattaagagagaaattattacttgaagataagatagaaaaagaaatggaatatgctcttgaaagtgggcaattcgtaatgtatttacaaccaaaatataatattaaattagataaattttgtggaagtgaagccctagtcagatggcaatatacagaaaaagaagtcatatatccaggtgattttattcctatatttgaaaaaaatggatttattagaaaaattgatatgtacatattagaacaagcttgtaaagaaatccggtctttatttgataaaggaatttcacctttacctatatctgtaaacttctcaagagttgattttttaaaaaaagattttattgaaaacatagtaaatatatgtgatagatataaaataccatatagtttaatagaaattgaaattactgaatctagtatgtttggagatactgatactctatttaatgttagtagaaacctacaggatattggttttatagttgcaatggatgattttggctcgggatattcttctgtaaatatgcttaaaaatataccattaaatgtaataaaattagatagaggattttttgttgatgataaagatgttgataagagtcaaattgttataaaaagcatagtttctctcattaagcaattaggaataagggttgttgctgaaggaattgaaacaagaagtcaaatagaaatgttaaaaaaagcaaattgtgatattgttcaaggatattatttttcaaaaccattaccaattaaagaatttgaaaaattagtctataaaatatagtcagcgagtcttaaatgggaggtggtgattaagtgataagagcaaaatcgttaaaaaatgtactgagtattgttttaatatttttatttacaataatttctttttctgattttgcatttaaaactaatgtccaggaagaagaaaatagtaaaattaatttaagggaaatatccctacaaagttccaatgctataaaaataaaattagatagttctctatcctttattaaaagtgtggcaaatatggtttcttattttaatactatagataactcaaaaatagttccattattagctaacatatcaaaagaatctgactttcaaagaatctctattgtatctcctgatggaataagtcataccagcgatggcaaaattatcaatgtgtcaaaatatcagtattttaagaaagctattaaaggagaaagcaatatatctgaagttgtgaaatctccaattgatggaaaagatacttttgttatagctactcctatatttaataagaataacaaaataattggtgttttatacggttcttactacaatgataaattagctgaatttatagatataacaagttttaatagtgaagggtacatagatatatttgaatctagtggtcaatttgttttaaaatcttcacatacaaacaaactgattaagtcaagtagtaacatatatgatatatttaaaaaagcttcttttgatgatggttatagctataaaaaaatatatgaagatacaaaaaataacaagagtggctttacctcatatgaatacaaaggagaaaatcgttatgctacttatacacccattggtgtaaatgactggtatgtaatttctgtgataccacaatatactgtaagaagaaacattgataaaataaatcaattagcattttctcttattttcaaagtattcttattgtttattatgcttataatatatattatttataaaaacaataaatctcagaaagatatactaaaagctaacaaagaaatctcatctattacaaatagcattcctggaggagtacaaaagtgtaccctgggtgaaacatgcaatattaattttttaagtgatggatttatagagttgtttggttatacaagagaagaaataaaaacattgtttaataatgatttttatagtttaatacataaagatgatgttgaaagaataaaaaaagaaatttctaaacaactttacaaaaataaaactattgaattagaatataggattataacaaaaaatggtaatacagtatgggttttagataaaggagaacttataacagaacctgatggaaaagaatatttttgttgtgtaactgtagatattactagaacaaaacaattagaacaagagatggaacaaaaaaatctagaacttgaaatgatatcagaaaatattttaggtggtataattataacagaatttaatgatgattttactataaaatacactaactctggttatctttcaatgattggatatacacgtgaacaattagaaaatgaacttaaatacaaagcttgtaatcttgttttttatgaagatagaaagaaggctcttgaaagtatacaacatcaattaaacacaaaaggaatagctgtatatcaacatagaataagaagaagagatggtaatattatctgggtttctataaaaggaaggcttattattgatgatgatggtattgaaaaaggtatttggattctaaatgacataacagatttaaaaaatgcagaacaaaaacttaaaataaatgaagaaagatttagaattgcattaaagcaaacatcaaatactatatttgagtatgatataaaaacaaagtcacttttaaatactagtaaagagcttgataaatataatatttataaaattactaaaaacgttccatattctctagtagaatcaggagttattcataaagattttagtgatgattttataaacatgtatgaaaatgtaataaatggagcaaaaaaagcaagttgtgtagttaagatgaaacttccagatgaaaattatatatggaataaagttaccttgactactatttttgatgaagatggtaatcctgtaagagcaattggtatacaggaagatataagcaaacaaaaggaagcagagataagatataatcaagaaggtaagtatcattcagctatattgtcggaagcaatgataacctatgaaataaatgtatcaaaagatacttttatcaaaggaaatgaaagttggcaaaaaccatttggaattaagcctgacaataattattctgaaatggtaaaaactatatcaaacagtattattcacaaagacaataaagaggtgtttttaaatacatttttgtgtaaaaatttattatctgcatataacaaaaatataactgaaataaaattagaatatcgaagaatgaatcaagaaaataaaatgatttgggtcatttgcacaatgcacttaataaaagattctattacgaatgatataaaagcacttgcttatgttaaagatattgacaagcaaaaaaatgaagaaattaaattaaaattaaaagctgaaagagatactcttacaggattatataataaaggtactacagaaaatttgattaatgatttcttgaactctgacgaagcaagcttaggaatgcatgcatttttaattgttgatatagataattttaaatctgtaaatgataatttaggacatgtatttggagataaagtattatttgaagtttctaaacacctaaaacctatatttagaaaagatgatatagtaggtcgaattggtggagatgaatttatagtattcttaaaaaatattcagtcttttgagaataccaaaaagaaagcagaaaaaatatgcgatatatttagaaattcttatacggaaaataaaaagacatataaaatatctggaacagttggaatttcatttgtaccagaacatggaactgtatttgaagaactttataaaaaagcagacatagcactttattatgcaaagagcaaaggaaaagataagtatgcactttataataattgtatctaccaaaatgaacttgaaaataatataagtgataataatataaaattagcaaataaatgtgagaaatccaaaccagtacttaaagaaattcttgattctattgataattatatttatatagtgaatccaaatacttatgaacttctttttgtcaataataaggtgtctcgtttggatttagagataaaattaggagaaacctgttataaatcactattaaaatctgagagaccatgtaataattgccctcttaacggattagaagaaaataagcattcaaaattcaaaatagagacaaatacatttggtaaaaatatcagtatagcaagttggattaattgcatagatggagaatacaactgtcttatagagtgtatagattcttctttatacaaaaataaataaaaaaggactatgaagatatgttaaatagtataactttgatacttggtataatatttacaatttactatttttatctcaaaatagtttttggaggaatttcatttagtgagattttcttagttgtaggaattgtactaattatctatcaaatatttaagaaaaaaattaaagaaaagaaggttttttatagggtgttaaaaataataatcagcatttttttaatagtatttgtagttactgagagtttaattattttttatcctaaaaatagtttagaatcaaaaagtgattatctcttaattttaggagcttctgtaaaaaagactacaccaagtacaaccctgaagggtaggttagacactgcattgaaatacctaaaaattaatgataattgttatgtggtagtatctggtggtaaaggaagtggagaaaaaataactgaggcaaaagctatgaaagattatcttataaaaaatagtatagataaaaataggataatagaagaggataaatccacgaatacttatgagaattttaaatattcaaaattgaagatagaagaacatagtcaaagaaaactaagtgatttaaaagtaaaaatagtaacaacagattttcatgttctcagaagtaaaatattagcatatagaaatggatataaaaatacgtctttttatgctagtaaatcaaaactttcatttgtaccaacttactatacaagagaattttttgcattatggaaaacaatcatttttgatagataataaataaaaagactagatataaactcatatctagtcttttctattcccttaattctaatccattttccaactttacttgttgtagaaatttcaacattgggatttacaagtaattgcttataagaagttttatattttacgattccaaaatataattttccttcataatccattataaatccgaatgatcttactcttggtttattatcttcaactgtagcaaaatagaatgttgagttttcttttaaaaaattcattattttttccatgattaaatcctctttgtatcttatactaatataatgaatataaataaaatatttataatactaatataaattgatataaaaacaattacaatattatattgattattcaaaattatatataaaattcagaaaaacatttcagtttacataataaaaataaagtaaactaaaattattgattttagattaaagtgccagattaagtatttaagtagattttaagcttgatttgattagaaaggtacaaactatcaccgaaaaaaattaaacccatttaaaaagcaatataaaagcttgttattttcgagaaaaatagaccctctaaactcaattagataaaaataaaatacaaaaaattatatctctgaatatctcaagtaattaagtttaaattttacgatattttgtttgatgatttataatataaaagcatattcttaatcttctcaaattaaaaagagtaaaaaataacaaaaaaatcactgacatttcactgacaaattgtaattttgttattataaatacattgaaaatacttgattattgaaaaatggcataaaataataccttttatgccatttactattgtttgatagtttttaacttatgacataagatattttttaacatatacaataaaatataaaaaaattgatattgcaaataaaaaaaatacatattagatgttatagaaaaaaagcgcacttataggcttaaaatgtcacataaaagagtttcaaagaataatatattatgaacacaaattttgtaatcacaaaggagtgataatatggcaacagtatcaggacaaatagtttttgatagaaatagaagtgctaccattgattctggggactcaggaatagccaatataccagttgtattacaagatatagcaactggagttagacttgtggttctcacagatgcatcaggaaattatgtttttactaatgttccaaatggtaactatagaattgtagaagcttttggaactacaggaggagtaccaacaccagggaattttgcaacagcgatagtaggtccagttccaattgcagaaatgccacctattagttctgtgacaaatcctcctattggttcaacaaacttagatggtacaacacctaacacactattaataacagtagcaggttcagatataataaatcaaaatatattaaatgggcctgtgatttatacacctatagagaatatattggattcttgcgtgtctgtatctaatataaaccttattacagatgcagataacggaacattcggtttttttccaccaggtacaccaagtaatacaggacctgaaatagaaccttacccaaatgtgacgccagattttacgtatgttgtaccagacccaactaagtttacacctttagatggagaatatacagtacaaaatattatgacaaatgcaatgagtaatgttataggagcttggtggcgtattgctgaccatactacaggaaatgaaacaggaagaatgatggtggtaaatggttttaatcctggagctgtattttttaaatcaacagtacaagttacacctaacactaattatttatttagcacttggattttaaacctttttaaggtaacaggatatccaccaccacagctaggtgtaagaatatttgaccaaaataataatatactatatcaagcaacattaggagctcaaattccagttaatacaaacgcaccagaatggaaagaagtaggtactgtgattaattctcaaaataataatcaacttacagtagaattttttagtgaaggagaaagcgccattggaaatgactatgctatagatgatgtttctttaagagaaatagctgttccaacctttactccaataaaaacaagtaacacagaaactgctaatgtaggtgatataatcacatatacagttacattagataatacttgtgatagccctttaactaatgtattttttagggatttaattccaaatggtttagagtttatacctggaactgtaacggttgagacggtagcgttattgtccaaacttgatgtcgataagcatatagatgttgaaattaagctggatgagcttgatttgacaagtgcagagagcaaagcaacatatgctcaaattaaggagtatgtattagaaaaatttgggctaaaggtttctacactttatattgcacagattaagaagaaatgtggaattgaactgagagagcattataataaatctaaaaaagacaatcaggctatcccacagtgtacgcctgaaaaagaagaagctataatggacgctttaagacattttaaaatgatttagtataaatggagagtatatatgagatggatattaaaaattatcttatttccaattagtatagcgttaagtattctcattgcatttctttcatttttacttggcataggaacagcaatactttacctgttgatgatgttttgcatatttggagcaatagcatcttttttacaaaaagaggttaccatagggatagaagcattgatattaggatttttgttaagcccatacggaataccaatggttggaacagctgttatagccgttttaacgggagtgaaagaagcaatacgctctatttagaaaatgatatttatatatgattttagacgatagaaataactatcgtctttttgtttgaaaaaaagaaaggagtgtttgatgagttatgtatttatttgatgaacaacctatagttgcgaataaaactcttgctagagaaataggattaaacgaagcactcatactacagcagattaattattggatagaaataaataaaaaatcaggaaagaattatcatgatggtaaatactggacatataattcaattcgagcatggcaagaaaatgactttgactatatgagctttgatacagtaaaaagaactttttcaaagttagaaaaagcaggttatcttttagttggaaattacaataaggatccaagagataaaacaaaatggtatacaattaataatgataaacttgaagaattatatatggatatggatttgaaaaaacaaaaaatacaaacagaagcattaaaaaattctatgcccaatgcattagggcaaaatgcaccaatggataagggcaaaatcagccaatgcaataatgcagattgcactaatgcacaggttcaaaatgcactaatgcaaaaggataatttgcaccaaccattaccagagaatacaacaaataatactacaaataatactacaaataattcagcatatatttccatccatccttccatcaaagaaaagaatcaattattttcagagaatatgaagggagggaggatagatataagctataaaaatatatatcaaaattgtttagaagaattgcgacaccaaacaggatattatgaacatatgagtattgggaataagagtgtggctgaagagtttgatgaaatattaaagatactggcagatgtaatggtattagatgatgaatctttcattactatcaaccaaacaaagatatctgtacaagtagtaaaggaaagatttaggaaacttaattcaggacatttagagtacttagtaggagtattaagagaaaatgaatataggattagaaatataagagcttttgtcctgaccgccgcttataatgcaccaagtggaatagatgcctattattcggctcttgtaagctatgatatgagaggaggatattgatgtgatcaatgaagaaatagcaagaaagaccttaaatatggagataaatgctggtaaagttactggaaaagttctattaaacttattaaaaaaattgatgaaagaagcggagaaattcggaggacttgaaaaactggtcaatgccaacggaaatgaagtaaagctaaaagatatggttaaaaagggacagcttgaagaaatcccagtggaagaagctgagcttaaagaacttaaaaaagagttgaatagatacggtgttaaattttcagtgatgaaaaataaagagacaggtaaaaactctgtattctttcaagccaaagatatgaaagtgatggataaagcttttaagcacgctctttcaaaatcagaaaagaaagcagaaaggaaagaatctattcacaagaatattgagaagttcaaagagatggctaaaaactctatttcaaaagagaaaatcaaaaataaacaaaaggagcaaagcctatgatagataagatactaaaagacatcaaaggcttatttaaggtgcaagataaggcaaagtttctaaagcagaacattccctatcttgcatttttctatgttggcaatatcttttctcatcatgtaagagcatatactggtggcgatgtaatagacaaaatatttcaaggtatactggaacttaacaccatgagctttcttccaagcattcatcctacggatattttaatgggagtggtagtagctgttttaatcaaaattatcgtatataccaaagggaaaaatgctaaaaagtttagacaggggaaagagtatggctcagcaagatggggaacgaaaaaagatatagagccatatatggatgaaaagtttcaaaacaatatcctacttacgcaaacagaacgattaaccatgaatggcagaccggcaaatccaaagtatgcaagaaataagaatgtacttgtaatcggtggatcaggaagtggaaaaacgagattttatgtaaaaccgaaccttatgcagatgcactcgtcatattgtgtgaccgatcctaaaggaactatagtccttgagtgcggtaagatgcttgaagataacggatatgagataaaaatcctaaataccattaacttcaaaaagtctatgaaatacaatccctttgcttatcttagaagtgaaaaggacatactcaaattagtacagacaattatcgcaaacaccaagggagagggagaaaaatcaggtgaagatttttgggtgaaagctgagaaactctactatacagcacttattggctatatcttctatgaagctccaagagaagaaaagaactttgcaactctgcttgatatgattgatgcttcagaagtcagagaagataatgaaacctatatgaatccgatagataggctctttgaagcactggagaagaaagaacctacacactttgcagtgaagcaatataaaaagtacaaattggctgcgggtgatatatgctctaagtgacttcttaatcatgattttgtcatggttagtgaagcaatcacttagagcatttttgtttcaggaggtacagccatgagaaatgaaaaaattaccccactgtacgagcgcctgagccgggacgatgagttacagggcgagagcaactccatatccaaccaaaaacagatgttagaggattttgcccgccggaatgggctgcccaaccctacgcactttaccgatgatggtatctcaggcacccgttttgaccgccccggatttttggcgatgatggaggaagtggaggcagggcgtgtagaggcaatcgtcatcaaggacatgagccggttaggacgcgactatctgaaggtcggtcaagttatggaggttttgcggcagcgaggcgttcgtctgattgccatcaacgacggtgtggacagtctgaaaggcgatgacgattttaccccgttccgcaacattatgaatgaattttacgcccgtgataccagtcggaaaatccgatctgtgtttaagtcaaaaggcatgagtggcaagcacctgaccggcactgtgatttacggctacttatgggacgaaaaacgggagcattggctggtagatgaggaagctgccgaagtggtacgccgtatattctccctcacgctggagggatatgggccttaccagatcgcctacaaattatccacagatcggattgaaattcctgtcgtacaccttgcccgcttcaacgagggtgtgaaccgttcaaagccggtcaaagacccctatgggtggggatcatctaccatcgtgaacattttgaaaaaacgagagtatttagggcataccatcaatttcaaaacccgcaagcactttaaggacaagaaaagccactatgtttctgaggacgaatggacgatctttgagaatacccatgaagccattatcgaccagcagacctttgatttggcgcagaaaatccgcagcaatgtacggcgttatccaaacggctggggcgaagcggctcccctcacaggcttgctctattgtgccgattgcggcggcaagatgtatgtccaccgcaccaacaatggcaagcgggtttctcaatatacctgttccaattataccaaagttccgtgtgggacactatgccctacacaacaccgtatcaatgagagtgctgtcctgacattggtttccgacacgctccgggctatcgctgaatattcgagaaatgaccggacggaatttattcacactgttcaggagacgcaggttgctcaacagagtgccgatatatcgaaaaagcgcaggcgtctggctgctgcccaaaagagagccggagaactggaaaaactgatttgcaaaatctatgaggacaacgccctcggcaagctgccggatgcacgatataaggcgcttgatgcacagtatgccaaagagcaggacgcacttgagattgaaattgcagagctggaaaaggctgttaccggctatgagcagagccagaaatccgcagagaaatttatagccctaattgataagtatgagaattttgacactctgacaaacaccatgctcaacgagtttgtagagaaaatccttgtccacgaacgcgcccgaaaaggcagtcaggacaccacgcaggaaattgaaatctacttcaattttttagggcgctatatcccaccatccttacagccagttcctttaaccccggaggaacaggaagaactgcggaaaaaagaagaacgcaaggacaggcttcatcagaattatttgaagcggaaagccagcggcgcacagaaacagtatgaggacaaaatcaaggcgaagaaaaaagcggaaatggacgctaagaaagccctgatccgggctgaggatatgaaaaaaggtgttttttctactatcggtcagctaccaaaagaagaaccgcgcaaaggcagcatagcagccagcgcagcagtctaatcatcacgaagcaaaggagaatgaatatgagtaagttgacttacattcgttgtggagattatgatatacccaacctaaaactttctgaacagccggaaacttctatcggcaagtacggcagaatgcgaaaatcctacctaaaggaacatcgccccattctctacaaccatctgctgatgagcgagaagctgtatccacacctgttagagattgagcggacagcacaggggcgtgtggaaaccatgttgcctcacatgatggaagttgcgggtgtcacggaggaactgaaagcctgtgaccctatgcgctgggtggggctgatgaacacattaacggcacagattgaggaaattttaatcagggaactgatttgcagctgaatgggaggtgcggaaaatgctgacctttgaaaagattttgaaagtgtttcaggcatatctggatgatgatccactgtatgaggtggttcagaccagccacggttatacattgatggcatgggaaccccaccggaatgactggtacagcgctgaaatacagaaaaccccggaggatttacggaacgctttgttgggtacatacgccaactttctggaagataagattactggaaatgaccgtgacctgactgtgacagaaaccggagaaatccaacagaggtgtcgggaacttttggaaaagtgccgggaaccttgatatagaaatgccagaaggaggccgcgattatgcgtcctccttctgcttcgcagtctgttccattttgagcgccccgtctatggcaccttcgataatcggcaggtattcttcagggcaaagcttcagcttgtggctgacccgttgccgctgttcgctttcttctcgcataatctccgggttaaaataccgttccacgggaagtccgcagaccttaatcaattggatcatcacaggcaggctcggaatcgcaccttgattctcaatgttggcaagataccgccattcaatcccaaccatttctgccaatgtttttcgtgccagacgccttgcctctcgtgcggctttgacatctgcaccgaaggtttcaaaaccgggacaatcttcaactttcgccatataacatcacccagttacattgtataattcatacttcacccgtggaatgttgctatatgcaggttggttgaagtttataattcacatttcgttccttgcattgttcgagaaagagaactataatatactctatggaggtgcagaatggattatatgacactaaaagaggccgccgaaaaatggggcgtgacacctcgtagagtaaattactattgtgctgccgggcgtattcctggtgctgtaaagatggcaactatctggctaattccaaaagatgcggaaaagccgattgacggaaggacaaaacaaggaaaggagttgcgccatgaataaaatcctgattatagatgatgacaaagagctgtgcgctttgattaaacgtagcgtacaagcagaaaacatagaagctgatttttgtaataccggaaaagagggcttacaaaaattaagagagcaggaataccagcttgtggtgctggatgtgatgatgcccggcatggacgggtttgaaacgctggaagaaattcgcaaggagtacagcttgccgattttgatgttcacatctaaaaatgacagcatttctaaagtacggggcttacgggccggagcggacgattatcttacaaaaccgtttgatatggatgaactgattgcccgtattgcgtctcttattcgccgctacactcgctttaatcagcaagctggagccatacaaaagctaaattttgacggattgcagattgaccttgaaaatcgttctgctactacatcaaacggcacttttgaactgcccccaaaggaatttgatttgctcctgtactgtgcaaaacatcaagggaaaattttgaccaaacagcagatttatgaggaagtatggggcgaagaatatttctatgatgacagtaacattatggcgattatcagtcggcttcgtaaaaaattagaagtcaatccttcaagcccaaagtatatacaaacggtcaaagggattggctaccggtttaataaggaggtgtaatcagcatggaaattatcgtattcttgtccattgtgattgctgttgtggctgtattgacttccatcgttctcgttcggcgtgtaaaaaaacaaatagcagaaatgaccgatgtgctggttgatgtgaaaaacggaaatggcaaccggcgtattctatctgcaacaaatgaactgacagcacctcttgcctatgaaatcaatgagatcgttgtggcctatgaaagcagactttcaactgtacggcagacagaagaaaccaaccgccagcttatgacgagcctttcccatgacgtgcgaacgccccttactactctgcttgggtatcttgacgctacacacaaaggactggtcacaggaaaagaccgggatgattatattgaaaccgcccgtcggaaagcccatgatctgaaagaatacattgatgtactctttgactggttcaagttaaattcaaacgagtttgctttggagatccagagcgttgaggttgcagagctgacaagaaatattctgatcgactggataccgatttttgaggataaacaggttgattatgacattgatattcccgaacagcctgtccgggtaagattggatatggatagctatatgaggatcatcaataaccttattcaaaatgtaatcgctcacagccatgcggacaaaatcaaaatttccctatcgaagaaggaaaataacatggagctgctgctggcggataatggagtgggaattgagaaagaagatttgaaacacatatttgaacggctttataagtgtgataaaggacgctctgaaaaaggcagcggacttggtctttctattgtccatcagcttgtagaaaaaatgggtggaagtataacagttgaaagtttgccgggaaaaggaactgaatttatgttgctttttcctttggagagttaagcgggttcccgtctttatggcgggagcctttgtcattttactggatttcaaattgcaaggttaatgcaaggttgcggcaaggttaatgcaaggttggcatgatagaataccttacagaacaggaggttttgaatatggatacaaattatatcattgaaacaaaaaatctgacaaagcaatacggctcacaaaagagtgtggccgacttaaatatccatgtcaagcgtgggagaatttacggtctgctgggcagaaacggagccggaaaaaccactaccatgaaaatgctgttgggcttaacgaagccgacttccggggaggtcaaaatctggggaaagtctttgcaagggaatgaaaagaagttgctcccccgcattggcagtctaattgagtcccccggcttttatccgaatttgaccgcaacggaaaatctgcgtatttttgctactctacggggagtgccgaacagccatgcaatcagggatgctctggatttggtcgggcttccttacaaggataaaaagctgttttcgcaatactctcttggtatgaagcagcggttggcgattgcccttgcagtcatgcacgacccggaacttttaattttagacgagcctatcaatggacttgaccctatcggtatcgcagaagtacgttcctttattcgtgagctttgtgacgcgcgaggaaaaaccattttgatttccagtcacattctttcggagatttccttgctggctgacgatattggaattatcgaccacggcgcattgctggaagaagaaagccttgccgagctggagcaaaaaagcagtaagcatatccgttttacgctttcggatactgcacaggcggcaagaattttggaacgcaatttccatgaaaaccatttttccatacaggacgaccataatctgcgcctgcacaaccttgatctgcctgtgggtaaaattgtaactgcctttgtagaaaacggattggaggtatcagaagcacatacctgtgaagaaagtcttgaagattacttcaagcgtgtgacagggggcgaaggaattgcttaaactaatcaaatgcgaatttttgaaattgaaacggaagaaatttattccgctgattattctggctgctttcctgtttccaatcccgctgacttatctgatgacaacgccctctatgatggagcgatatacggatcgggcagatgctttcgatggactatttaacatggtgttgggatatggtatccagtttttactgccctgcattattggagtgattgccgctatcctgttctttatggaacgcgacaacgatacattcaaaaatctgcgtacaattcccgtaaccagcacgcaaatggtgcttgcaaagattattgtcctctttctttttggaattgttttttgtgtggcttctaccattgcaacaattctttgcggaattggaacattagaagtttatggaattggttataagctgtttttggcggttgaaacggggatcttcattacggcaggaacactcccgttgattgtccttgttgtctttttcagtaagacctatgttttttccattttgttgtgtgtcttttacagcgttctgaacatgagtgctacggcattgtttgacacactgcctaaaactatgttatggcttctgcccacgccactgactacattttggagtgcgggagatatggcggctcatggaataaaaatggacttggagcaaatgacagggctaattccctcaacatttcaagttgtattcattcttgggatcatggcattggtttcgttcttactaattgacagattatataagcagaggggggaataaacatggttcgcattgtaaaaacagaattttataaattgaaaaggtatcatatcctttgggcgggcgttgcactcatgctcctatccgtcctgctgaccttgtttacctctatggcgaatgatggttccgtttgggattttgcctatcttacagaacaggtcatcaaaaacaatatgtccatgatttttccgatgtgtatcagcctaattgctggatatatgatttctcgtgagcagacggatgacacattgaaaaatattctgactgtgccgatctcttttaagaaactgttgaccggaaaattgattgtgtgcggcgtattgtctattattttcgggctgatatgcagtctgtttacaatcatagcagaaatgattgtgggatttcccggctttgagatttccttagctctaaaagcagccttgcagattactgcggttaatttctttttatatcttgcggttctgccgattatcgctcttacttgtcggagggcaggcagctttttagtcggtgtaatcattgcttttgtctatggatatggagggatgtttgccgcaggaaatatgacattagcaaacctttatccgattaccgcaagtcttggaatggtaggctaccgtagctatgataccgcagtcaactggaatattggaacctgttcttgcagtcttgcgcttgctgtcgttatttctgccatcttgattttgtgcatgaaagaacgagaagcaacccaaacaaagaaaaaggccaaaaaggtagctccaaagaaaggctggtgatgattttatgaagaaaatagttttagcattagcatttgtccttttgggaagttttatgatttctggctgttcaaaagatgaaattctcaatcattacaataacattgttcagtctgcgggctccatagaactgacagggaaatcgtcactgcaaggggaaaaagaaaaaggaattgatgattatacagggacttatacggctgattatgcgaacttttcaggtacagagtatttgttcggaggaacttccataaagagagaagccggtaaggagctgtctattgattgcaccttggagattacggaaggtactgcaaaagtattttggatttctggatctgatgaagcagtcacgttgattgaggcaaccggaacttatagtgacacaattacacttcctgatggtggaaattatattggcattgaatgtgagaatttcactggaaacattgaattaaatattgaataatactctgccggacgacggcaaaagaaaaaaagccgtcgtagagcagacaatttgacacgcccatttgaaacggcggctttgattttcagagccgccgtttctttgcgtttgcacaaaccaatgacgacttgcagggacacggtagccgattggaggttgatttaccgtgtccttctttttatttcgcagtatccatgatctgcaccagttaaaaaaagcctgttcccagcagcggagcaatgcggtcagaagtatgcactataccatgtaactaaacagcaaaatatactctattacgctcgtatggctttatgccgtccgggcgtttttttgtccctatggagccagaacatcgggtcagcatggcccgaactttatccccggtgccgctctccgccaccccattcagattttcccgaaaaaatctgaatggaggaaaggcagatggaagttaccatcaattataacggacaagctgtggccgtggaggttacgctggaagtctatgaatttcttgaccgggccgatcacaaaacggagaacctgttccatgaacagcggcggcattgggatggccgggagtttgacgagtacatagcttttaccgagggcgtgggcgtttacagcgaaacgccggaggaatacctttgccgcatggaaacgctgcatgagctgatggctgttctggacacttgtaccgaggcccagcgccgccggttcctgttctatgcgcttgacgggctgagccttgcagagatcggtgtgctgtgcggctgctccaaagtggctgtgtatcaaagtgtggaggcggtcagaaaaaaatttataaatttctttgagaacaggcttaacgaatgacctgttttcgggctaccaagtgaaagggattttcccttatcccagcgaggggcggacagcggacaagctgtccgcctctccgattttcaggaggtaagcctatgaaaacaatcaatctgcggtggatgtatccccactaccggcatgacgagtttgtagatgttacggacgaggtatgggcagcgatgtatcaggccaagcgggagatggagaactatgagcgtcggaaagtctaccaccgcgcctactactctctggacgcatacagctggctggaaaattacgcgctggaacacagcagatcgccggaagatattttgctggaacgagaagaaatgaccacccgcctgcatctgatagcagctctgccggtggctctggctcatgccactccgacacaggcccgccgtgttcacgcctactacattgccggtatcaagcagccggaaatctcccggagagagggcgtccacagcagcaaggtcagcgtttcaatccgtcgggggctgcggaatatgcgccgttgctatgatggtcttttccaaacagagtgagggcgtgcctatgcagaccatcaacctcaaacaatattatccattttgcaaagaggacatttttgtggaggtgtccgatgagatcgtcgaagcgtttcttctggacaagagagccgaggccgccagagatcgcaagatgttccggtataaggcgttttattccctcgattgtaacgatggaatcgaaaatgccgccatcggctgggcgcagccatcgccggaggactacctgatagaaaaagaagaattagccgaatacgaagaattgatacggcgattgtacgaagccatttcctccctgccgcctatgcaggctcgccgtgttcacgcccgctatatgctgggtatgaaagtgaaagatattgccgcaatggagggtatcacgccatcacaggcgggaaaatccatccatgccgcactgcggaggctgcgccggtactttgctcgacagaaatggacggtcaatctatgagtatttccaaagaaaagaggtgcctgacatgaacgaaaaaattacagcccacccccaaaaagaagaacgggagaaagtcctgaaggagattcggcagcttgaaaaccgaaagaagattttggagaacaagcagcggaacgaagaacgcagggttcgcacccgccgcctgattgagcgtggagccgttttggaggggattttcccgttggctcccgacctttccggcgcagaggttaaagcatttttgattgccctgtctcatcttccgggggctgcggaattgactgcaaacctgccaaaatccggggacacgccataagtcccttgtttacaagggcgcacttatacaccgttgccggtgctgtgcgccctgccgggggcattgcgtacttcgtccgcgatgggaagctacgctccccaaaccccttgtgcgctctgcacagccaaacacccgctttgcgtttgtccggctccacagagcctgttatcccctcactgaaaggaggtgttccccatagatttctgtcatatccccgtcagtatcatcaagcgcagcgcaggccgttctgctgttgccgcagctgcttaccgcagcggaaccaagctgacaaatgaatgggacggcatgacccacgactacacccggaaaggcggcattgtccatgcggagatcatgctgcctgcccatgcgccgccggaatttgcagaccgatctatcctctggaacagcgtggagcaaatcgagaaagcaagggacagccagcttgcccgcgagatcgaagcagccctgccccgtgaactgtccggcgaacagcagcttgcccttgtgcgtgcctatgtgaaggacaactttgtagacaaaggaatgtgcgccgactttgctatccatgacaagggaaccggcaacccccatgttcatatcatgatgaccgtccggcccctgaaagaaaatggcgcatggggcgcaaagtgccgcaaggcatacgacctggacgaaaacggccagcgtatcccggatgggaaaggcggttggaaaaatcacagagaggatacgaccgactggaacgataaaggaaatgtggagatttggcgggcagcgtgggcggcctacaccaatcgggcgttggaatctgccggtagaccggagcgcattgaccatcgcagctacaagcggcagggcattgataagattccctctgtccatctggggccagccgccagccaaatggaaaagcgcggcatccgcaccgacaagggcgaagtaaaccggcagatcgctgccgacaacaagctgctgaaagaaatcaaagcccgcattacccgtctttacaactggtctaaggccgaagccgaaaagccggagggtcagcagcccagcatgattgacttgtgggaggcccagcagcagctcaagcggcctgacacccgcaccggcaaaatccgggctttgcaggaaagcgctgcactattcagctttttgcaggcaaacggcatccagtctatgcagcagcttcatgaaaaaatcgctgatatgaacagccgttactatgacctgcggggaaaaatcgtcaaagctgagcgtcggatcgccattcttaccgaacgcggggagatgtgggaacagtacaaccagtacaagtccatccacaagcagcttgccaaagtaaagccggaaaagcgggaacagtttgagcagcgccacagccgggaactgatcctgtatgatgcagcagcccggtatctgaaagaactgaaagacagcggcgaggggataaccccgaaggcatggcagctggaaattgaccagctggccgctggaaagcagacggacacgcttgccatgaaatccatgcgggaggatttgaaatcagtggaacggctccgcaaaaccgccgagcagctgtcccgacaggaacgggataagcctcacgaccgggagccggatcggtaaaggatactgcattttggcgtacccatatcaagtgcatcgcatttcacgacatacttttgcacacagaaaaaccgccgtacaggtttccccatacggcggcagactgtttatttgccgaacaagtcgctgtgtgtgccggtgcgggccagcgtcagcaccagaacatcatcttctatgcggtagacaagcagccagtccgggagaatgtgacattcccgatggcctgcccaatcgccggacaggtcatggtcacggttcttatccggcagcggttcgcccatcgccagcaacgctacgacctgctccagcagttcgatcttcaagccacgcttgatggctcgtttgtagtcttttttgaaactggtcgtgtacttgacggtatatttggtttctttcatcttttcaggtcagcaaataactcgtcaaggtcattgtagccctttacagacgggtcttttgcaatcctttccgcttccagcatggcagcaaccgtttctttgttcggctgttccagccttacttcaaagggaatgccgccttcacgaagcgactggcgcacaaagatgttaaacgccgtagtcaggttcatgccaagttcagtaaacagtgcgtccgcctgcgctttcaaatctgcgtccatgcggatactgatgtttgtggtatttccagccatacgatcaacccctttctgctggcaattatagtatatgccatttgcacgaagaaaacaatactttgcacgaatatttaacaataaattcattcaaggaggttaccggctttatgaaagaaatcatttatgaagaataataagtctgaacctatccccgtcatggattaccgccagtaccgcagagcgcggcggctggtacatgagtgctgcaactacatcggcggcaactgtatcgcgctggatgatggggagaaatgtgtctgtgtccagtccatttcctactccctgttatgccggtggtttcggacggcggtattgccgcaggataaggaactggaaacggcgctgttccaccggctgaatgctaagaaatgcgccgtatgtggggcgctgtttacccccggttctaacagggccaaatactgcccggaatgtgccacacgcatgaagcggatcaacgccgcaaagcgtaagcgaaaacaacgggagaaatgtcacgctttaggggctgaaaaacccttgtaaatcaaggattttttcgagggtgtcaaaggcaggctgatagatttatcctccggcccctaaaacggccttaaaatgcgtacagaatcccaagagaaaccccaaggaggaaccctatgtcagacaaccgaaaatattattacctgaaactcaaagaaaactattttgacgatgattccatcgtgctgctggaaagtatgcaggatggtgtgctgtattccaacattctgctcaagctgtatctgaaatcgctgaaacatggtggacggcttcaacttgacgaggacattccttacacggcgcagatgatcgccaccattacccgccagcagatcggcactgtggagagagccttgcagatctttttgaagctgggtcttgtggaagtgctggacagtggcacattctacatgagcaacatcgaacttttaatcggccagtcctctaccgaggccgagcgaaagcgggctgcaaggcttcaaaataaggctctttctgcgccccggacaaacggcggacatttgtccgacattcgtccaccagagatagagatagagttagagaaagagatagagataaagagagagatagagaagggacgctccgcccgcgcctatggccgttaccagaatgttttcctgacggacggggaactggcagacttacaggccagctttcccactgtatggagccagtacatcgaaaagctatccgagtacatggcttctaccggcaagcggtatcagagccatgccgccaccatccggcgctgggccggtgaggacgctaaaaaaactgtcacaccctcacgcaaccgggattacagcgtaaaggaggatgaaactgtatgattgagattaccgcagaaatccgggcattcatcgacaaggcagctgccggtgtggaattggctgaggacgagtatatagacccgtcagacgggctcattcactgtaagaaatgcggcggccaaaggcagaccgttgtgccatgctttgggaaatccggctactttatgccgcgctgcatctgccagtgccagcgggaagctgaggagcagcgcaaggctgctgaagaacggcagcgccgcatggagcgtatcaaacgccgaaaggcacagggtttgcaagaccgctatctctatgactacacctttgccaacgacaacggccaaaatcccctgatggacaaggcccgcgcatatgtggagaactggaaagaggcatataagagcaatatcgggcttttgctgtttggagatgtgggaaccggcaagtctttcttcgccggatgtattgccaacgctttgcttgaccgggatgtgccggtgctgatgacgaactttcccaccattctgaaccgcttgaccaggatgttctctgaggacaggtcggagtttattgccagctttgacgagtatgacctgcttatcattgacgatttgggtgtagagcgcagtaccgaatatgctatggagcagatgtttttcgtcattgacagccgctatcgcagccgcagacccatgattatcacaacaaacttgaaactgtccgagctgaaaaacccgcctgatctggctcacgctcgtatctatgaccgtattttggaacggtgtgcgccgattctttttgacgggaagaatttccgggaagaaaatgccggtgctacccgacagacagcaaaagacattgtaaacagtaagcacgattgattttttaccgggcggcacagaaccgttcggagaaaggagcgccatgaacaaagaaccccgtactatgcaggtgtcagacgccgctactgcgtccagagcgccggaaaacacgccagcgatggtaaagaaaatcggtaagacaacctacaaggttcatgtccatttcagcaataccagcacagaaaccatgagcgataaaatcaagcgtatgctcaaaaatgaaattcagcagatgtgacagactgataaacgaagccgccttgtgctaaactgataatggtacgcaccaaaatttttgtcaaggaggacacgaaaatgctttacacagaaaaagagaagcatgaaattgaacgagtaaaggaggtctttgcggaacatctgcggcaaagccctgattttgaactgctctggtcggacaaggtaggctatgtctggctggcgattggcgtaaatccagtctatgtggataccggtaccagaatcgaatctgccgccgatctctgttacaggtgtttggacgatgtagctacggatgttttatatatgacgggcaacgatcacgcgctggaagcagccgatccgctggaattggccgaaatcaagcggcgctgggagccatatatcaaccagctgccagactatgcgtatctctgcaaagacctgctgaacggaaaaatgtaatctatcaaacgaggtgtcaggagccatacagtgcttctggcaccttttttgtagatttttgtgaatttgatgaaaaagtccttgacaatttgtctctggaaaaactgccaaatcgattcttatttcttgtggtgcaagacttgctccctttgatattcaggaacttagggacttgatgagtgacgatgaacttgagcttgatacactgggagatagaaaaacagcactatttgttattatctccgataccgatgatacatttaactttgtagtatccattatgtactcacagttatttaatcttttatgtgataaagccgatgatgtatatggcggacgattacctgtccatgtgaggtgtctacttgatgagttcgctaatatcggcttaattcctaagtttgagaagttaattgcaacaatccgttcaagagagatttcagcaagtatcatacttcaagcacaatctcagctaaaggcaatctacaaggataacgctgatacaatcgtaggtaactgtgatagtaccttgtttcttggtggcaaggagaaaactacgctaaaagaattgtctgaaacactgggaaaagaaactatcgacctgtataacacgtcggaaacaaggtcaaatcaaaagagctttggtttaaactatcaaaagactggtaaggatatgccatacttgttcgtgaagagttcagttgccttgaatttcacatgaacagggacacgatcaactggattctgaaaaaactgaatacaggaggtcgaacatggagcatttaccaaagaaaatccatcacaacggcatcagctatacgctggtgggagactactatatccccgatctaaagttgtcggaggaaatccgccccatcgggcggtggggtcggatacacaaggcgtttctgcaagaacaccgtcccggccagtacaatgaactgcttctgtcgggaaaactctggacgtatcttgccgatctgaacgagcaggccgatgaccgactggcgtgtatcatctcgcagatgcaggctgcggagggcgtcaccgaggaactgaaagcccgtgaccagcttgcatgggtcgggggcatgaacagcatccgcagccgggtagaggaaatcatcctgtctgagatgatttttgtctgagggaggtgggtgcatgattctggaagaaatgtataacggcagattttatccctgtgaaacggtggtcgctgattcaccgaggttcaagcaggcagtcaaagccagcgccgccctgatggacactttatcggagcgtctgagcaaagaggactatgcactggttgaagaactgcgggagcaggtggcaatcgcccagtgtgaggaaaacgaaagccacttcaaatatggcttttctgcggggctgcttgttcagcaggaagcccatgcacaggtatcgcagaaagacaaagaatagcatcttcaatagtgactgttcccaaactgggcacaaccactacaacagaatacagcttcacgaaagccatttgccaatcaatcggcggatggcttttttgccgcttccggatatggaaattttacttccgcttacgtctggccttgcggttgggaggaatggggctggcctttcccctcatattgttggagcttttgagctgcttggacaggctcagtatccgcaggaacgccgagaagtcctccgaggaaatcttctcaaagggtatctgcaacttatcgcagaactcgtggatcagcatttctgtatcgctgccctgccctatggcctgctcaaatttttccttcacatcatccagcgtgggctgcgggtcggcggtggtcttgtctttgcggtgtgcttcccggatgtcccggacgatgctgtccagatcatcgtgcatgacgtggctgtaaaaatcgctttcctgcacctgccccagttccagcgtccgcatatagaggtcatcttctccgggtgcatacttgttcatgacggtctgccgggtggcctccaacaccagattcatctgctccacccgcatattggcgatctggtcgatgcagatttccatatctatcatcagccgccggaaattcgggtgggtagccagttcgcagagaagccggttgttgattttgccgctgctcaaaagttccaccatatcatcactcagatgcagagattgaagttctatgtttgggtgatttttattttccgtcagccccatcagatagtcggtggacacgccgtaaaagtccgccagcgttgcaatcgcaaacgggctgatgtccttgtagtcatcggtttcgtattttcccagcgcggatttagacaggccggtctgctccgccagttgttccagcgtcaggtgcttatctaccacccgcaggtctttgagccgctccgggattgtcagctttgcgtacatccaaagccccctctctcgttatcgtttttcagtgattacacccattatagcacgattccataagcgtggaaatatgcggatttcaagcgtttttccgacgttttggatatacgggaaagggcctcttttttcggtaaactggttcttgcagacaggcacagaaccttgaaaatcgaatgaccggctgcaaggggtatggcctccggggaagtgacgccaggacagaaatcgagcgcaccaaagaggccgatacgccgggagaaattccgggcaggagcggcttgcaggcagaccggcagacagaaacaagtttatcaatcatgcggggcgcatggctccgcagcaaagaaacggaggaaatcattatgacactgagtatgaaagaaaagaagattctctacgcttacggctgtcccagccaccacaatacggtgacacggctgaaatggctgacggcactgacggttgacccggaggccaaacgccggatgctggggctggcccggaaggtggagacggaggtgggcgaaaactggtacgaggatttttaccaccatctgcggatggagatggacgagtaccgccgcctcaagcgcagcctgcgtgtgctgaaatcttacactgattatgaggaggatctgtatgaggaagctgtctaagtatgagaaagaaaccattatcaactggaacgaggcggaaaaccttgccagcgtctacaccttcaacgccagcttgaagcgcaggctggctgatttcagccggaagtacccgctgctgtgccggttggagcgcagcacgccggagggcagcgtgacctatgtgctggataagtcccggctgtcgatccggctggtgccgccgtacagcgaggaacggaaagccgccgccagcgcctacgcaaaagagcatggctttcaggtggtaggggcggaagaaaaaatcgcctgaaaccggggcgtttacggaaaaaatgccgggtctgcacccgctgttttgaccggcaatccccgcaggcgtattccgtatccattccccgcttatgggcgcaaatgtgcggatacggagccggtgaaactggcaaacaccgcttctgcggtggaatccagcttcgccggtgcgggagtacagagggcagccagccctttgtgccggggtgcaggggcggcagcgcactgctggggtcaaggggcaacgcccattggcaggttaagggcggcagccattatcgggtcaagggtgaaacgccttgcccagggagagttgatgcctgcgtcaactcgtactgggtattacctgacgcaaaattcgcaggatttgcggcttcgccgccccttccccggccccagaacatcttcgcaggaaggaggaaatctgtttgaaactgacacgacacaatgggcgctccggcaagcatggcacctataatccccgccacaatgaccgccggttcgatgtggagaacagcgaacacattgacgcagaacgggcaaggcaaaatgtctactgggactgctaccggggctttacgacacacgagttccgggagaacccggagcagccggatttcagctttgaggaaatcgagcggatgtactacaacgagcattacggcggccatgtggaggcccagaacgcccggaatgagaaaacccggcacacggagcgcaaccgcaccgtggaggacttgctgaaaaacaacaagacctgcccggaggaaagcatctaccagatcggcacgatgggagaatccgtcccgccggacacgcttttttccatcgtcaatgagttttatgaggaatttgagcgccgcttcggttcccatatccacatcctggactgggcgctccatctggacgaggggacgccccacatccatgagcggcacgtctttgactgtgagaaccgctacggggaactgtgtccccagcaggaaaaggcgctggaagaactgggcatccctctcccaaaccctgagaagcccaaaggccggaacaacaaccgcaagcagacctttgatgcggtttgccggacgattctgtttgacatcgccagacggcatgggctacatctggatcaggagccgtcctacggcgggcgggactatctggaaaaacaggattatatcctgatgaaacagaaggagcaactggcggcgcaggagcagaagctggaagaactgacgctcaaaattgaggacgtggagacactgttagatgatgtttccgatgcggcctatgacaaggcggtggaggtggtgaccgataccgtccggcaggagacgcacaaggaagatattcgtctggtggaggaatcgaaaaaatgggtgctttcgccggagcgcaaagctccaaagaaggaacgtgagtatgccgctgagcgtctggatggggtcattaccaaaatcaaaaacgccatgcagcacgctctggcgaaaatccagcggacgctgatgcagccggaagtcaagcaagccgggaaggagcaggtcaagaagaaagccaaagaatccattatggatattctggcaaaggcaaaaattaatgctgaccgggataaccgggagcgttgggaacgtgaggggcgaatcgccccgaccaaaaagaacgatatagagttgtaaggcatctgattttctgtgaaaaccggatgcctttttctctgtctggaggtgagaaaatcgaatgtgtttgaagcggtgaagcaggctgtccccacaaggcaggctgcggaatcttatgggatacagctcggcaggaacgggatgacctgctgtcccttccatgatgacaaacatcccagcatgaaggttgaccgccggttccactgcttcggctgtcaggcggacggggatgtgattgattttaccgcccgtctgttcgggctgaacaagaaagatgcggccttgaagctggcggaggatttctcggtcggctttgacgctaaaggccatgacccgccccgcaggaagccgggcaagcgaaaaatcagcgaggaactgcgctaccggcaggcggaacagaaatgtttccgggtgttgtgcgattatctgcatctgctggaacgctgggagaaggaatatgccccgcagacgccggaggaagcatggaacccgctgtttgtggaggccctgcaaaaaaagccgtacacggagtatctgctggatattctgctgtccggcagtatggaggaacgggcctgcgtggtcgctgagtatggaaaagaggtgaggaagattgagcagcgaatatcagagtttaccgccagccacccggcaggccgtcatgagcgcagccgaagctttagcgccggagcagagcgttgacgaggtgcgggaaggcctttctgtcacggagaagggccagcccgccaacaccatcggcaactgccggacggtgttctcccatgaccctctcctgcgggacgccatccggctgaacctcctgactgaccgggtggacatcgtgcgggatttgggctggcgcaggaacaccagcgccctgacggatacggatgtgaagtatctgcttctctattttgagcagaactacggcctgaccagcgagaagaaaatgacggcggcgctctccatcgtggcgaatgagaactgctaccatcccatacaggacgtgctgaacggccttgtgtgggacgggacgccccgcatccgctcctgtctccatcacttcttaggtgcagaagtcagcgattatgtagaggaaatgttaaaacacttcctgctgggagccatccggcgggtgttttctcccggctccaaatacgaggaaatgctctgtctggtgggcggacagggggctggcaagtccagcttcttccgcctgctggcgatccgggacgagtggttctccgatgacctgaaaaagctggacgatgaccgggtatttttgaagctgcaaggccactggatcattgagatgtcagagatgctggccaccagcagcgccaaaagcatagaggaaatccgctcgttcatcagtcgccagaaggaaacctaccgcacaccctatgaggcccagcccaaagaccggctgcggcagtgcgtgttcggcggttcatccaacacgctggacttcctgccccttgaccgggccgggaaccggcgtttccttcccatcatgatttacccggagaaagcggaggttcacattttggaggacgaggacgcttccagagcctacctgttgcaggtctgggcggaggccatgaccatctaccgcagcgggaagtattccatgaaattcagcaagtccatccagcggcagcttgtggaggtgcagaaggatttcatgccggaggacacggaggccggtcaaatacagggctttctggaacattataccggcagcatggtctgttccaaacagctttttaaggaggcattgggccacacctatgacgagccgaagcggtggcagcttcacaatatcaacgagatcatgaatacagtggtgacgggctggaagccattctccaatccccggatgttcgccggatacggcaggcagaagggctgggaacgggacgtttccggcaacgaactgcccggcaacgaagatggatttgtggaactgagcgaggaagaatgccgccagttggagcttccgaaggagtggatcgcctgaaaatggcggtctgttgccgggatggttgccacttggttgccgggttcgttgccggggatttccctgtctggatacggaaaaagccagtaaataagggatattttaatatttatcattatctccggcaacgaaagcaacgagatttttcaagaaaattcacaaagtaagatttgcaggccagacggtagtttacaggtttttagaggttcgttgccggacttcgttgccggtgctgccgttcggcctgtctctctatggaggtagcctatggaaaaaagcaaaaatcagaagaataaagtccgttttgtggtggtgcgggagttctccggggagaagtccatgcgggaagcctttgagcagctcattgagcgccagacctgcgaacacttcgaggaatggcgtcatcagcgggaaatggcagaaaaagctgcgtaaaaacggttgattcagggacggggacatggtactataatggtatcgtgtccctgttcatagaaggagaacgctatgagcaggaaaaaacaagtctatgaaaaaatcaccgctctctactgccgtatttctctggatgacggcggcgacaatgagagcatgagcatcagcaaccagaaactcatgctccgggacttcgcagaaaagcatgggatgttccagtatgagtattatgtggatgacggctatacgggtcgcaatttcaaccgcccctcgttccagcgcatgatcgctgacattgaggcggggaaaatcggctgcgtcatcacgaaagacctatcgaggctcggtaggaattatatcgaagctggcagctatatcgaaatctttttccccaaacacaatgtacgctatatcgccgtcacggacggtgtggacagcctgacccgtcaggaaatggacatcacgccctttaagaatatcctgaacgatatgtacagccgggatatttccaaaaaggtgctggcgggacgcatgacccgttcccggcagggaaagttctgcggcgggcagccgcctcttggcctgatgcgtgacccggaggacaaagggcatctgatccttgacccggagactgcgccggtgatccgaaaaatctatgatatggcactggacggctggggctgtatgcggatcgcaaagcagctcatggatgataaaatccccatcaccagagtaaaaagcaatacagaatgtgacgtgaactactattcatgggggagcgcaaggatcagccatatcctgagaaatcccttttataaaggcgcacatcttgtctgccggacacaccagaaaggcatccgctccaacacttatgacattatcccccgtgaggattgggaggtcatcgagggctgccacgaagcgattgtgacgccggaggaatgggaacaggtacaggacatcattgaccgcaggccaaccattatgaaaggcaacgcctgccccttctataacctgttccacgggcttgtctactgcgccacctgcgggaagtccatgcaggtgcggtatgaaaaggtcggcagaaccgggaagaaccgcttcaccggcgaaatgcgggagccgattgacagggcatactatatctgccagacttacaaccggctgggcaagaacgcctgtaccagccacaagattgaggcaagggatttgtacaatctggtgctgaaggatatacaggaattggcggcgcaggccatgaaggacgccgatgcgttctaccagcggctcagcagccggatggagcgccggtatctggtggacgcttcccagacagagaaggaacggaaacggctggaagaccggaatcaggaaattgacgggatgtttttgagcctgtacaccgataaggccaaaggcgtcctcaccgagcagcggtttatgaagctgacggcggcgctggaacaggagcaggaagccaatcagaaacgcctgcacgatctggcggtgatgcagagccgggcggacgcacaggaaagcgaagtccgaacctttatcaaggaaatccggcgctatgccgccattgcggaactggacgagtccgtactgaaccggcttatcagcaaaatcctgatcggcgaggttaagaaggtggacggtcagaaggtgcaggaagtcagaattgtttataactttgtcggggaaatcccggagattgcagcgtaaatagtttgccccatctctcaaccattgagggatggggcttttctcattcagtattcaatcaccagtgtttcctcccgtccatccgggaacgtgtaaacaaactttgctgctgtatctttgcaagcccaaaagaacagatcgttgcactccatgtccagctccacattaccctggaaagtgtcggtcaattgtatggtctgaaaacaaggaaatcgctccgtattggtgcgggaaagctgttgccgtaaaatctcatacatccctttctttgtaacaggattttctaaaatgtagcgatagcggaaccgttcattgctaaagcggttgctattgattacccgaagcagatagtcggtaaactttggtggcatgatgctctcaatacttaccacaacttttcgctccgggctgttatggatttgagtaatcagggaagaaagcacctgcggagataagatgataaaatccatttctcccttgataattagcgtgtactctttcatttcaggccccttttttgctggggttagatagcgatactttttacatctaccatgttgcggcggtcatggttgacaacttgcgtcggctcctgctcggtatcaacctgtccgacaaagctataatggatttcgattttccgggtgttggtttcccggtctaattcatgtatcaaaatacggtcgataaactcatggacgttttcataggtcaattcctgtatgtcgctgtatttcccgacaatctgaataaaccttgatatatccctttttcgctcggtaacggttgcgatctgctgttgtaactcgtctatccttgcggcaagggatttcttttcgtccacatagccggaagttagaaacacaaaccgttcatctgtcagtctgcctaatgcgttgtcctcatacagcttgcggaaaagcgtgtcaagttcggtcatacgcgcctgtgctttgaaaagttccttttgctgctgcgctaatgcctttctcgcttccatgtcgccgtactcggtagctttacagataaagtcctgttcgtgttccttaacataccgcaaaacccgccgcatatcttccagcactaaatcaagaagtacgtttttgcggatataatgagaggtacactcgctgcctgtccttgccctgttgcgccatgcgccgcaagaataggaaaacttgcgcggctcgatatttacgccctgttggtaatacatcttatgtctgcaaccagcgcaaaacagcaagccggaaaaaatatcaatctccgctgcttttgtcgggcggtggcgggtagcaatccgcttttgcgcaagttcaaaggtttcctcgtcaacaagcggctcatgggtgtttgggaagaaatagcgttgttcttcttcgttcttccgggtctttttcgacttgtaggataccttgtgagttttcgcggttatggtatgccctaaatattcctgccttgctaatatgtcatagagcgttttgtccggccaagtatagggggcgatcattgcccgctgataccgcgcctgtcctgtacgctgatagcgcaacgctccaatcgtcaagactttgttttccgcaagccatttttggatttcgcacatacgcacgccgctaacaaacatagcgaaaacctgtttgacaatcggcgcggtttccgggtcgggtataaggtggtggcggttgttcgggtctgggatatagccgtatggatattccccgttgacgcgctcgcctttttgcgcctgtgcctgtttaactgcgcggattttcttgcttgtgtcgcgggcgtaaaactcgttaaaccagttccgcaagggggtaaactcgttatcctcccgcgctgtgtcaactccgtcgttgatcgcgatatagcgtactccgttttcgggaaatacaatctctatgagttcgcccgttttcagatagtttctgccaagacgggaaaggtctttggtaatgaccgtcgccactcgtccggcttccacttcctgcaacatcgcttgcagcccctcgcgctcaaaactcacgccggaaaatccgtcgtccacaaaaaactttgtgttcaaaaaatggtgttcgtccgcatagcgttgaagtatcattttttggtgctgtatgcttccgctttctccggcttgcatatcctcttgacttaaacggcagtaaagggcggtgattttattcgactgtaacattagtcctcctttccgacagccgaataaacaggtataatgtgttgctatcattataccatatcccgccgcctaatgcactactcggacgctaaaaatcccggatttccgggctttttctgcaaatcctttacaatgagtttctcaatctttttatggattgtatcggttgccttttcactcggcaacgcttgaacaagataggtgattttccctattttgcgttcggttgtaattgtctgttttttatccattagaaaaacctccttttcctgtatggataaactatattcgtcaaaaggcaaaaacgggcggttgttagctgcaacctcacgggagtttcaccccggcccatgcttatgggtgcgccgcgcaatactttgagggtgttcaacgcgggagtatcattgtgccgccttgtatgtcgtcgcccacaagctgctaaacctgttttacggcgcggtagttctcgctcggcttttcccctatggggaaaagctgtcatggcgtacccgccgactggctcggtacagacggaatgtacccgtttgcctgttatgctgcgcaccaaaggccgctttctttgtcaaagaacaataggctttgtcggcctgcaaaagcacatcaacagcggatatgcttttgcggaacgacaaatagcccataacgggaagcgtggaaaggggacacgctccccgcatgggctaaaagattatcctacatgaaaagcaagggtgcgggtaataaggcgcacttgcagcctgttacgcatttcctcgtccacataggaataggtattgcccgcgtcgtctttcagcgtgcgggtacaaagtttcgctatgtaaccctcgtagtgcttcaagatcgcgcacatggcggttgtgtcgccgtttgccgctgcggaaatgacagggaacggcaacagattttcagacttcctaacggtattcatcatctgcttttccctccaaatactgtttgattttcgcaagcgcggatttcctgtgccggaaaaccgtcgtgcgtacaacattcagcagttcgccaatttccgcgtcgctcatatccaagaagtaggacaaaaggataatgtcgcgtttcctttcgggcaaagcgttaagggcttcggcaagcagttcatttttgacgagtacatcaaagccggacacttgaaaacggaaataatcgctttcgtattcgtccgttgtgaaaagctgcgcgagttcgctttcgctcaaatccgaaaaagtaacttcgcgtgctgcgcgtttcgcaagagtgcggcggtggcttttcgcttcgccgaccaaagttttctttgctaatgcgtcgtactgatgttgtattctttccttgtcggaagaagatagctccatagagttcacctccttcccgcgtggagtagaggacgggagttaagggcttgtcctctctgcccctttcgctccgtacccgttcgggagatggctcttgagtgcgcttttcagaaaaaagttgaaaaaagcaaaatgcgcccgtccgcaagacgcggacgggcgcaaaggaaatgtaagcagtagctaaatgtattgacagttcacattcatagccggaatatcccgcttgcggagcatagctttttttgaccgcaaagcattaggcgggttacagtaaataaaaatggacacggcgatacctccccgataccgccgtatccttaaaaaagggcgactttaatacactacccgcaatccattctataatagggaacagcggcttttgcgcaatattaaataaaaaagccgataacacataggttttttgacctaatgcgttatcggctctgcgtctatgcgtctggcacttttaatcatttttttttgaatttattatatgtgttagctaactgtccacaagccgcgttaatctctctgccatgagaaactctcatagtaacttcaagtcctgcttgctctaattgatgtttgaatgcaactatttcccgtttctgtggtgctttaattcttgaattgcttgttgggttgtattgtaacacgttaatcataacttttttgccccgaaaccattttgcaagttgtcttacatctgagggccggtcatttatacccggtaaaagcaaatacgcaaagacaattttgcgattatgcctttcagaataggataaggcttgcttaacaacatcttcaatagcatatatgcgcatgtgaggaataatacgatttcttgcagattgtgttgctgcgtgtaaagatattgtcaactgaattttaagatgttcctcgcgcaatttttttaattgatcgaccggaccaactgttgatatggtaatgccgtcggttggaaagttgagcccatatctatctcggagaatatggattgcttttatcaagttgtcataattgaataaaggctctcccatacccataaaaacgatacggtttacttttcgacgcaacaatataatctgttgtacgatttctgacgatgttagattacgaacaaagccatttcgcccggactcacaaaaaatacaaccaacaggacaaccgacttgtgtgctcacgcaaacagttccaccatctcgccgcttgataaaaaccgtttcaatgtatttgttgtctttcagttcgtaaacatacttttcagtatcactgcttttgcaaatattttttaccaacattgatagattttttttgcgtggtaattgcttatataattcttcatataaggcttttgcttcattctcgccaataacttccgacatttctttgtaagtaaatccgtatggatcattccgtacttccgcaggcgtatatttaggtaaacgtttcatttttatatcctttcttctaaataataaaagtttgtttttctgtatttttgattacaatctctaatttttctacatcaatgatatgcgtcaatttgcatttagggcagaaaagaggaaaatcttttaatacagtattatgaaatacttgaactctcgtctttccgttacaaatcggacattttatccaatattttttaagcattatatttcactcgtcctttttacacaagtcataaccaccggctaagccggtggcttgagttggccctataagggcctattaccggcatgcgtctcaagacgcactgaattttatttcacccgcatcatttgccccgcagcccgtaaacgggcagccgctgttctaatgcaagtctttcttcactgataatttgctgttagcagctcgcttcgctcgatgcttgaagctaaagcttttttacggggtacctccaccggcacagccggtggtttccctacccaaaaaatgcacagagcagtacaacaaaactaaggcatagcttgcactatgtctatactatatctatacgtcgttagttttttgtatagcatccgcaaaataagcatgacaaaaaagcccatgttgaaaatgggaaaatcctttttttcaatgcttatctaatacgcatgctatgcaacataaacgccgcctccttttacataaattttattttatcagaaaatcagtctactgtcaatacacaacaggaagtatttaacctaatgatatgaattgtgtggacatatccaaaaagaaaggtgaactgtaaaatgtaacagggtgaatgaaaatggcaaaaagacccgtaccattgtacgactttaaggctttcggggcagctataaaagccgcgagaaatgaatacggcgagagccgcaaaaaggtaagcgacgagttatatatttccccgcgctaccttgcgaatatcgagaacaagttgcaatataattcagttcttcagcaacagcacattgatagacagaatctctataacaaactttcaaaaggacaagataaatcgtaagaagaaaaggcgctttgagtgcgccaagttcagaaaaccatgtcaatgtatacgcacacaaaaaacttatacctgttataagccatctatttacagaagcacgataccgtggttctttgcaaaaacaaatactgaataaatacagtcccaaagattctgtcagcgttgctgttatgtcgagcacttgatataaccacattacagcatatccccccaatagtccgtcagccgttccataaattctttccgtttcggctggctgatgggaatgatctcgcctgtaatcaattcaatgtccagcttcttgatgcctttcacatagaacagattgacaatgtagctggtatggcagcgcacaaagtctttgtcgcaaagctcccgttccacttctttcatgctcttatagcagataatattttcctgctcggtatggaacatcagattgcggttatatgtttcaacatatcgaattgattttagcggcaccttatatttgccggtatcgttggtaatcaccagagagggggtatcttctttctggctgcgctccaagaatttgtccatttctgatttgagccgggcatatttcatgggcttaatgatgtagttcgtcgcatggtatttatatccctcaagcccatactgtgtaagagtagtgagaaaaataatgcccacggtttcgtccatttgccggatacgctcggcagcatgaagtccgtccaccaccttcatttgaatatcaaggaaaatcaggtctatggttggatcgtatttttcaatcagctccataccgtcatagtacggggtaatctttatgtcccgtcctgtttccttgctgtattggttcagtaaatcggtcaaatactgaacaaagtctttttcatcatcacaaattgctatatgcagcactgtatcacctgctttcgttataccgtctgtcctttggcttctctgcctccttggggatcagccagacaccggccattttgacagcaccggggatgcgtccatcggtgcagtaataatttatctgtcgggacgaaacgccccatttttcgcttgcctctttgagcgtcatgtagtccatattcgcacctccgacaacatttcttattatatttcatcagctcgaagaacgcaaggcaggaaatgtgaatagatgttgaatacgctgctatcgaagaaggatttctttgatagctttttttaattcatcacttgacattgtggcaaagaactgatgagtcaagatgagattactgtaatggacggtggaaaatgtatatttcagcttagaggtgtcagaccttttctttcagataaatacgatattacaaagcacaagaattataagctgcttgaggattatgacaagaagaatttgtttgacatagaaagctatatgaagcgaaaaggaaaagcaaaattaaatagagagacggttattacaagaatgcagtaagtcttaaaaagatttgctgtttttttattcaaaatcaggaggcaagatgataaggatcagaaatcccacttaaacgaaaactaaatagtaagagtatcagcgattggaaaagaaaaactccagtcgttttttttattgaaatgaaaaggagaaatttaaaaagatgaaacaagaaatgattaacatcaacgccaacttagtggcagaacctactttctcaagttttgaaaaagagggtgaagaagtagaagttgtaaactttacgcttgtaaaaaaatatggaaagggcaaggagtacatcaattgtgcagcctacggagaaaaagcagagaaagcagaggactttgaaaaaggcgatttgattcatgtattcggctactttaagaagcgtgaaaaagagggaaagacttacaaaaactttgtagtgaagtcatataacaagattgagaagaaagaagaaaatgaggaggaataaattatggaatttttcgcacaggcagtaaatgtattaaagattttagttatggcagtaggtgctggacttggagcatggggagttattaaccttatggaaggatatggtaatgataatccgggagcgaaatctcagggcatcaagcagtttatggctaattaaagggaacaaaaagaaaggaaaagcacaatccagacggtatcagcggcaggctacaagaataaattgtgatttcacaagattggtgctataataagagaaaagttcctgccggggcagccgccccggtggtatggatagaaaggcaggaaagcaatatgcacatcagctataaaccactctggcatacactgttagagcgtgatatgagaaaagaagatttaaggcttgccgccggtatgacaacgaatatgattgccaacatgagcaaagagggaaagcacatcagcatggacacattagcccgtatctgcgaaacgctgaattgtgagattaccgatgtgattgagttagtatcagacgagcctgcttccacaggaggtaaggagcatgagcgaattgaaaccaagaataacggaaaacggaattgattatatccttgtcggagattactatatcccagatttgaagctgccggaggaacatcgccctatcggaaagtacggacggatgcaccgggagtatttaagagaagtccacccagccaaattgaacaccttgaccttgacaggggagttatggacataccttgcagacctgaacgaacaggcacaggaacggttagacaccatcatggagcagatgaaagatgccgagggcgtgaccgaggaattgaaacgaacccaacaaatggaatgggtgcggcgttgcaataacattcacaaccgggcagaagaaattattttgcaagagatgatttattcataacggtatggtagaatgattatgacaaataagaattttttgctccatacgcccttgacaatagtccttacaatatactataatagtatttgtaaatattatttgtaagaggaggacttatggaaaacaatcattttaacgttgcgtgggcgaaaagcactgcgctatatacaaaagcagcttcagtacttggcatcggatacccggaaatgatggtgctgtatgcgctggaatccatgggagaactgacgcaaaagcagatcgcagagaatttcggtatgcaaaaacagacggttcatacggtcgtgagcgcacttcaaaagaagggctatttactgttggaggccagcgagggcgataaacgtgagaagcggatcgtcttgactgaaagcggacaggtatacgcccacagaatgattgcgcctttacgaaaagccgaggagaaggtttatagaacaatcgggaacgaacggctccaagccatgtgtgaaattcttgaccttttcaatcttctctttgaaagagagctgagaggaggtctgggcagtgaataacaagcggactttctttcagtatgtgattccgtccgtgttatcctttgcgctttccggggtgtatgccatcgttgacggtttctttgtaggcaactcaatcggggatgccggactttccgcaatcaacattgcatatcccatcacggcggtcctgcaatccgtagggacaggaatcggaatgggcggttcagtcaaatactccattctgaaagcagcaggaaatgagaaaaaagcacgggagttcgttgccggtgcaacatggctgatgcttcttttcagcgctgtcctgactgtcaccgttttcttcacttcagagaaaatcctttctgcccttggtgcatcgggcgagttgcttactctgggaaatgagtatatcaaggtaattgcccttggagcgattttacaggtgttcggcaccggactggttccgtttatgcgtaattacggcggttctttgtgggcaatgatcgctatgatctgcggctttgctaccaatattgctcttgactatacttttgtgtgggttcttggacggggcatgtacggtgcggcattggcgaccattattgggcagggagttaccatggcggttgcactcgtgtattgcgccatcaaaaagaacctcactctgaaaatcgcacctgttgataccccgaaaacggcatttcagatattaaaaatcggacttgctccatttggcttgacccttgccccaaatatctctcttgtgatcatcaaccgattttcggtttattatggcggacaggaggctatcgccacctatgcctgtatctcctatatcatctgcattgtttatcttcttttgcagggtgtcggtgatggtagccagccgctcatgagtcagttctacggagcaggcgaagaaaaatcgctcaaacaaaccaaaacgctggcgtatgaattttccatggttttggcggtaatcagtgcgattctgatttacctgctccgtggaaagattggactactgttcggttcatctgccgaggtaaacgcaggggtcataaaggtcatgccgatcttccttgtgtcggttccgtttgacgccatcacacgagtttccgcggcggctttctacgcaaccgaaaaaagtgtgctgtcctatgttctgacctttatcgaacccatcatcatgctggtgttgatgctgatgctgccgccggtgtttggcggtcaaatcacgatttggtggagcgccgtatttgcaaaggtcattaccgcatcagtaagcattgtgctgtccgttagatacagcgcacaaagaaatcgataacttccagtttatcgttctgattttcaactgaataaccacagtaaaaaccgctgctacatggaagctaacaaaccatgcaacagcggtttttctttaccgttttttcctttggctgataggcgttcccattttctttgattttttgagaatccgaatgagccagcggaattcttcttccgacagatttttatagttgataccgagctgcttgcaataaaggatgaccagcttttcatcccgactgcccttgaaattttcgaccgcttccagattttctttcagttcatcggcaacggtggtctggggcgcactctcactgtcctttttgtgagtttcccgaatatcccggataatgagattgaggtcatccagaaccatgtggctgaaatattcatcatcgctgatatgggcggcttgcagcactttcaaatgcgggtcatcttcgccggggcgataccgttcaatgatttcatgccggacggtatcgacaagtgcattgagattttgaatctgcatggtggcaatcccgtccacataaatctcaatgtctgcaagaaacttgataaaatctttatgtgtggcaagctcacagagcagacggttgttaatccgaccgcttttcaggagagcaaccatctcatcattcaaatgcagctccgtcaatgacgtgttgatctgctccctgttctctgtccggcacagtagataatcaacggaaaccccatagaagtctgccagcgtgataaggttgccatgattgatttccttaaaatcctctttttcataacttccgagagcagatttggaaatacccgtcagctttgatagttcttccagatttaagcctttgtccttgcggagttcccaaaggcgttcctgtatgcttgttgctcctttcatgggcgcacactcctttccggcggtttcattgctgccgcttaactggattatatcacactttccgcaatcgtggaaatttctgatttttactcctaattcctactttgtggacatacggcacagggcacaaaaatgttctatgatacaggtagttcatcgatggattattccaatcgaatgaccagcctgtgtgggatatgcttccccggcgatgtagtgccatgacttttggcagggatgtggaggaaccctgaccgaaacgagcgtaccaaagggagcgatacgccgctgtgagattcaggggaggaacgacaccggggagaactggcgaactgacaccgaaatgataccgaaacacgacaatctgatagggggatagcctaccctatcgctgatacttcgggagattttaggcggctctatggctgtaattttgccgaaaatcgccccgaaaccatacactaaaacgggaggaaacacaatatgccgagaatgagtaaaaagaggaaatatgagctttccttttacctcaatgaccgggggcgtgtcacttacaacgaattatgccggaaatgccagcatgggtgcaggcagagcttccgggcggttgtgattgactgcccccgttatttatccaaacgagcaaagaaaaaggaggcacacaccgaatgaattttgaatttatgacgatagacacacccttgccgccctgtatgccctttcccagagcgttgacaggatttccagtcagcagcaccgcaaaggtcatgtactgccggatgctggacgctatgctgtccaaagggcaggaggacgagaacggaatcctgtttgtctgcttccctgtcacagccattgccgcagtcctgtcccgcagtcccatgacggtcaagcgttctctgaatgaactggaaaccgccggacttatcatgcgggtgcgtcagggcgttggagaaccaaacaggatttatgtgctgataccgggaaaggaggacgctgcccttgcctgatacctcaaagctggaaaagctcaacagggagctggagaaaagcgaaaagaagctgcggaaagccattaatgatgaaaaggtattgcagcaccagttgaagcagcttacccgaaaggaacggacgcaccggctctgtacccgtggcggtatgctggaaagttttctgcaagagccggaacgcctgacagatgatgatgtcatgctgttattgaaactcatttttcacaggcaggacacgcaggaactattgaaaaaactgctggaacggaagaagccggaaaccccttagtttactaagggcgcaattatacaccacccagaggttggtgcattgcgttctccgaaggctcctcgccggagggctgtaattttccgcagtcatggtctgctccaaatcatacaggggacgctacgcttcccctgcgctggctgccgccagctacccttttgtgtacttgccatctggggacaccttgcgttgcaagctgttcccagccgacaagtttcataaaatatgctatcttttcgatagccaatgaagtataatgaagatgacaacaaatcggcatttgtaaaggaggatttacaatgaagaaaattggattaggtattgcgatactactctttgccattataatttctctttgctcatcaggaatggggctgctcgttatcggaattgggattgtaggattgattttttcaatcataggatttatagaacgcaagtaaaataacttccagtttgtcagcttcacatcgggtcaacttgccccgaacttttacaattaaatacccgccgcccacatagcggcacaccgagcaggaaatctgaaaaaggtctcctgctttttttctgcccaaaatgaggtggtaaaacgccaccccgtccaccaattagcgaaaggagggacacgaaatgccctgtccacacaacgaaatcacgattgttcagcgcagccagcggcagtctgcggttgccgccgctgcttaccagagtggcgaaaagctgttctgtgaatacgaccagcaagtgaagcactacccggaaaagcgtggtatcgtccacaatgagattctgctcccagcaaatgccccgccggagtatgcagaccgtaataccttatggaacgccgccgaagctgtggaaaaacaatggaactcccagcttgcaaggaggtgggtgcttaccatcccaagagagataccacccgaccagtatgctgtcattgtccgggagttttgtgagcagcagtttgtttccaaaggcatgattgctgattttgcaatccatgacccccatccgccgggacacaatccccacgcccatgtcatgctcactatgagggcaatggacgaacatggaaaatggcttcccaagagccgcaaggtttatgaccttgacgaaaacggggaacggataaaacttccgtccggcagatggaaaagccacaaggaggatacggtggattggaacgaccagaagtattgcgaaatctggcggcatgaatgggaggtcatccagaaccgctatctggaagccaatgaccgcccagagcgtgtggacttgcgttcctatgccagacaggggcttgatatagtccccactgtccatgaggggactgctgtccggcagatggaaaagcggggtatccagacgaacatcggcaacctgaaccgggacatcagagccgccaaccgcctgatgaagtctatccggcagctcattcaaaacctcaaaggctggattaccgagctgggagaaaaacgaaaagaactgcttgcacaaaaggcggcggaggaagcgacacttcttcccaatctgctgatgaagtatatggagatacgaaaggaagaacggaaggactggacaagggctggacagaaccgggggacttcacaggacttaaaggcagtcagcgaagccctgtcctatctccggcaaaaggggctttccactgtggaggacttagaagtatttctggaatcttccgggaaatcagccgccgattaccgcaatcagatgaagccaaaggaaacccgcagcaaagtgattgacgggattcttgccagccggacagactgccaggaatgtaagcctgtctatgagaaataccagaagatatttttcaaaaaaacaaaggagaaattcaaacaggaacacccggaggttgcccggtatgagaaagccgccgcctaccttgccaagcacccggacgataaggacagcacccaaaaggagctgcaagaggagcaggaaacgcttctggaagaaattgcagctctgaaaacaccgctgaccgaggtacaggaggatttgaagaagctgcgggacatccgctactgggtacggaaagccacacccggcacagaggaaagcaaagagccgcccaagaagcagcccatcaaggaagtcttgcaggataagacagacgagaaaaaagcacaaagaactgccccggagcagacaaaacacaaacaacaggatatggaactttaacaggcacttgccattttcaatcagagaatgtcaggtgcttttctttttttcaaggagggatagatttgaatgtatttgaagctgtgaagcagtccgtcacaacaagacaggctgcggagcattatggaatccgtgtaggccggaacgggatggcttgttgcccgttccatcacgataaaaccccaagcatgaagctggatcggcgttaccactgcttcggctgcggtgcggatggggatgtgattgattttgccgccgccctgtatgggctgggaaagaaagaagccgccgtacagctggcacaggacttcgggctttcctatgaggactggaaaccgccggggaaggtaaaaaagcccaagccccggcagaaatccccggaggaacagtttcaggaagcaaaaaaccgctgcttccgtattcttgccgattatcttcacttgcttcgggcatggagaaaggattatgccccgcactccccggaggaagcctttcatccacggtttgtggaagccttacagaagcaagaccaagtggaatatctgctggatgtgctgctctttggggagacagaggaaaaagcagctttgattacggactacggaaaggatgtgatacagcttgaaaagcgaatggcagagcttgccgccgcaaacgcagcaagaactaaaaaacaccatgaacgccatgcagccgccccagagcattgaggaaatcaaggcggggctgggaactaccgagaaaggcggtgtccgtcagagcatacggaactgcctgaccgtattccagcgtgacccgctgctttccggggctatcgcatacaacatcctgaccgaccgcaaggacatcataaagcccatcggcttccacagggaaagcaccgccctgaacgatacggacatgaagtatctgcttctctatctggaagaaacctacgggcttaccaatgagaagaagattgataacgccatcgggattgtggcgaatgaaaacaagtaccatcccatccgggactatctcaatacccttgtgtgggacgggacagaacgaatccgtttctgcctgcggcactttctgggggctgacgcagacgattacacctatgaagcgttgaagctgttcctgctgggcgcaatctcacgagcctttcagccgggatgcaaatttgaaatcatgctctgtctggtaggcggtcagggggctggcaagtccaccttcttccgtctgctggcagtccgggacgagtggttctccgatgatttgcggaagttggacgatgacaatgtgtaccgcaagctgcaaggtcactggattatcgaaatgtcggaaatgatggcaaccgccaacgccaagagcattgaggaaatcaagtcatttttaagccgacagaaagaggtttacaagataccctatgaaacccacccagcagaccgcccccgtcagtgcgtgtttggcggcacttccaatgcccttgacttcctgccccttgaccgttccggcaaccgccgctttatccccgtcatggtgtacccggagcaagccgaggttcacattttggaggacgaagccgcttccagagcctatatcgagcagatgtgggcagaagcgatggaaatttacagaagcggcaggttcaagctggctttcagccctgccatgcagcggtatctcaaagaacaccagcgggattttatgccggaggacaccaaagccgggatgatacaggcgtatcttgataagtacaccgggagcatggtctgctccaagcagctctataaggaagccttgaaccatgcctttgacgagccgaagcaatgggaaatccgggaaatcaacgagattatgaaccagtgcatttctggctggcggtacttcccgaacccaagaatgttttccgaatatggcagacaaaagggctgggagcgtgaaaacccggcaacggacttatgcaacccgtctgaaaaaacgagggacggttttgtggaggtctcagaacagatggagcttccattctgaaaatgacagcccgttgcaccccctgttgctatcccgttgccgagccggttgccggggaaaatcccttatttctgggcttttctcccctatgacaaccaaaacaacagaaaaataaaagaaaagtataaatagtaaccatcgccagattgagattgtttgcaaggtcttttgaagcccgttgccggacttcgttgccgacaccctctgtctggctattttcatgtatggaggataactgcctatggcaaaaaacaaaacagagattcatgttacaacggtgtttgacggggagctggacgcaaccgatgtgttcgtcagcctgatttcccagaaatacggtaagacaaatacgaaagaatatcttgctaaaaagaaagatttgaagtataatgaagatgaggttcaaaagagccagataccgtctggattgtgtgggtaaatggctatgatgaacgaaatggaatacagaacaatcggttcggcacttgccgggggttatcgtgcagcggtctattgcagactgtcaaaggacgatgacctgcaaggcgaaagtgccagtatcgcaaaccagcgtgatatgctggaaaaatactgcgaaaagcagggatgggaggttgtggcagtctatcaggacgatggcttcacaggtcttaatatggagcgtcctgatttacagagaatgttgagagccattgagcgcaggcaaatcaaccttgtcatcacgaaagacctcagccgactggggcgtaactatctgcaaaccgggcatttgattgaggactttttcccaagaaacggtgtccgctatatcgccatgaatgacggtatcgacaccctgcgtgataacaacgatattgccccgttcaagaatatcctgaacgagatgtacagcaaggatatttccaagaaagtccattcctcttatcttctgaaagcgcagaaaggacagtttaccgggtgtcttgccccgtttgggtatcggaaagacccggaggacaaaaaccatctgctcattgacgaggaaaccgccccgattgtgcgactgattttcggatatgccctgaacggtcatggtccgaactatatccgcagacggctggaggaagaaaaaatcccctgccccacatggtggaaccgggaacgggggcttcgcaatacccgcaccaaatgggaaaagaaagacccagaaaaaggacggtatatgtgggacttctccgtcatcaaagaccttttgatgaatcccgtctacaccggggcgattgcttcccagaaaaaggactaccgtttcaaaatcggcacgattggggaaaagaagccggaggactggattgtggtggaggggcagcatgaaccgctgattgaccgcatgagctttgacattgtgcagaataagctgaaatcccgccagcgtccggggcagaccaatgaaatcagcctgtttgccggactgataaaatgcggcgagtgtgggaagtcgctgacggtacgctacacaaacgcaaaacatcctcagcagatttattcctgcaagacctacaatgcctttggaaagaaccactgcacccagcaccggattgattatgacaccctttacagccatgtgctgcggaaaatccgggaatgtgccagagccgccctgatggacggggaagcggttgccgaccgcttgaccaatacctgtgaagccgagcagcgggaacagcgggaagcaatggaacgctccctcacaagggacgaggaacggattgaggttctggacaaaatggtaatgcggctttatgaggatatgattgcagggcgtatcagtgaacagaatttcaacaccatgctggaaaagacacagaccgagcaagcggagcttaaagcaaaagtgtccgagggcagaaagcggctgtccgatgaagtccagcttgccaatgacgcaaaacaatgggtggaagccattcaggaatacgccaatatcacagagctggacgcagccaccctcaaccgcttaatcaaagaaatcgtcgtgcatgagcgcattgacgaagataaaacaagacacatttctatcgaaattcattttaatctcaaacccatcccagaggtggaacaggtcactgcctgacctgtcccgccgggacggttctcttaaaaacaccatatagattttttgtacgccgccgcccgccatcgagcagagttttacacctaattggggataaaacagcttatggcgggaggaggcattgtccttatcggacttaagctgattccgcttcttgcaaatgtactcaagtaataagaaaaggagagcttagatgtttggaatattcgacaagatagaagaattctttaaagagcttctactgggcggtattcaagcaaacttagagtccatgtttcttgacatcaacgataaagttggtgcagttgcaacagatgtaggaaaaactcctatggggtggaacggagatgtatttgcctttattaaaagcattaacgattccgtcattattcccatagcagggctaatcatcacagcagtcctttgtatcgagcttatcaatatggtaatgcaaaagaacaatatgcacgatacagatacttttgaatttttcaagtacatcatcaagatgtggattgctgtatggttagtatcacatgcatttgagttttcaatggcggtctttgatgtggcacagcacatggtaaataaagcggcaggggtaatcaatacttctgccgttatctccggagatcagatagtaaaaatggtagatggattaaaggataaaggtcttggagagcttgtcatgatactctttgaaacctcgcttataaaggtggcaatacaggtcatttcaattgtgattatgcttgtggtttacggaagaatgtttgagatttatgtttactcatccatttcagccattccatttgccacaatgggaaacaaagagtggggacagattggaacaaactatatcaaaggattgtttgccataggtttacaaggactctttttaatggtttgtcttggaatatacgcagtattagttaagacaatacagataacagatatacacacaagtacctttacgatacttggatatgcggttttgctagggttaatgatgttaaagagcggaacactggccaaaagcgtattaaatgcacactaaaagaaaggaagggtaatatgaacaaaagaaaaacagtatttatagtagtaattggagcaggtattatggcgataattgataggatcaggcttcataataaggtggaagaattggaagaaaaaacagaggacattggtcgctgccataacgattttta
